United States Patent Application Publication US 2026/0265781 A1 - sequence listing, part 12

SEQ ID NO: 22 - DNA, 26290500 bp, synthetic construct (residues 24,099,626-26,290,500 of 26,290,500)
  source 1..26290500: mol_type = other DNA; note = Hot spot 1 - Chr 3 contig ref|NW_020822499.1 from Cricetulus griseus
attactagccataatctgtcaacgcattaatatatccagaatgcacaaagaaataaaaaaactaaacaccaagaaaatatgtgggccaggtatgttggcacatgcttttaatcccaaatatcggaggcagtggcaagtggaggcagtgacaagtggaggcagtgacaagtggaggcagtgacaagtggatctctgtgaattcaaggatagcctgctctacatagttccagaacagccagggctacatggagagatctgtctcaaaaaaaatagaaagatagagaaagaaataaactaaacaaatacccccataaataatacaaatgacaagtaaatactttaaataaaaactgttcaatatccctaaccatcaggaaactgtgaatcaaaactattttgagagcccttctcacccagtaagagcagccttcattaagaaattaagtgaccacctgggcagccaggtgagctggccctgagggtatgagttcagaagagctggccccatccattgtcagctgtgtggtggcaagggcatgggagatatgtcccccctctgcccctcactgctggagagctggccctgaaagtgggagagctggccctacccttcacttgggcaaagcaggagagctggtcctggtagagtgggtacaggaaacagtcatgctgaccaactcagctaccatctaccccatctaagaactgctggagcatgtgagaggggcagtcctgtagaaccaaagctgcaggatctccatgacacagggcaacaataggatatctgagaggagtcccagagaggatccagtattaatatggtagcagaagccagaggccttgaaccacacctttgcaagtaaagctatctgggcaaacgaatatagtggatgatacactgtgatgcactgcaggttccacgttgagattctgtttgtcttctttttgtgggggcagggtgagagggtggggggaagatttagagggatggggagatgagtgagagagggtacatgatgtaaattcacaaagaatcgataaaagtcaaaaaataaaagaaatcaaggagtctaaactagtaccatccctctggaaatcagtgtggcaagtcatcaaacagctaaacatagatcttccatatgaccagttgtaccactctgagacatatactctgtaccttacaatagagacacctacacatccatgttcattgctgccctctagctaggaaatggactcaatctagatgcccactaaactatgagtggataataaaaacgcagtacctttacacagtgaagtttcattcaaccatgaagaaataatgaaatgtgcagggaaatggagggaactggaaaacattatgctgagtgagatagcccaggccgagaaaggcagggatcacatgaaagagagtaagaactctcttcatatgtgtattttaatttatctttgggtttaacttcaaatgtttctgcagaccacaaaagatctgctttgaggaaatgaaaagaaagatgctaaagagagataggcagtagagatgaaagcagaagggggaatccttggccaataaggattaaatgaggaagaggatgagggagatgaaggaaaaggtgaggtgaatagtaaccaaaactaagtatacaagaggatatatagaaacctacaagtctatagcctaattttaaaacacattctaagtttgaacagagggacactacacaagtaaatactgccaattccagaagcgatgggtgactaaatgaacatcccagtaccagctgcagagtatctccctctgagttaggttaggatggcttcagaggctcccaaaacaacacaggacaacaccattgcccttgtttgcccacaactacatggtaagatcctattgctgcaaacagcatgcaccaagattgtagaacataatgaagtcaagctggaactgaactgtaagatcattccctgatgcctactgcacataatacaagaaagtgctgtggaagcttctgggggaaaagttattaataatcttctacaactttgaagcctgtgacctaaaatactaacctgccagtcaagatgtgtccactgatacaatagtggcatgactattgtggaggtaactgaccactcttggcttgaacagggagggattccctcatgatattgtaaacatggtcaaaacccaagcttggtccatcataggccctgggagtggaaattgctgctaacatttcactaatttgacatgttgttaaaattcccttctaaatatttttgtgtatatccttagacagacgctactctaaccataatcaaagaggcatctccttatagtgaataagagtgaattcagagatttactaacttctcaaggtgctgaaaataagtggaagttgaggtgttagccctaaataagccatttataccaccctttaaggttaagggagcatcacagaagagggaagtagcagaaagaaactaaaagccaatggtgggaagaaaggctgcaacaggttaccttctagacaatttcaatcacaagctggaagcaactgctgtcacttgcactggtctggaacaggactggacttgtcaacaatcagtcataaactggggtggatgaggtgggaatcataggacattaaccctccctggcaaactattggctcttatggatggtagaaggagaggaagtcactgtctttgtgtgcaccctagtgagttcatcaggctctaatagataattgacacccgtgatcatgcagatgaccctggttgaactcagtaggtcacaaaacaaaaagacacaaatgaaggaaatggactttacagtggctttgactggggtgggaaggagataagaaggaatggatgattacaattataatattatgtgtattattaaattgtcaaatgatattcttaattaataaaaaaagaaagccagacacactgatgcacatctttaattatagtgcctctcctctggaaggagaggcactcagatatttgtgagttccaggtcagcttaattacatagcacattccatagcagccagggatacataaccagaccctgtctcaagcaaataaattaaaataaaatttaaatttaaaaagacaatgtgatgggactggagagacagttcagcagttatattcttaaacactgagccatctctctatccccagaaattattttatttgtttgtttgtttattttatatgagggtttgcctgcctgttatgtctgtgcactctctgcatgtgtagaggcaagaagagggcattggatccccagaggctggctatgagcctccatgtgagttccaggaatcaaatgcaggtcctggaagaacaaccaatgctcttgtttgctgagccatcaattttacattttctgcctgttccttgctgtcatgacttccccagaatggactgtaccctgcaggtctaagcccaaacaaatcctcccttcttaagttgtttctgtcagggattttgatacaacaataatacaattaactagacagcttccatactttatgagaatagtaattacccaaaatatactttcttgcaaggtcacatttatctctaccctatattggtccttttcttctttttgtgtctgctgtttttcatttaagttgctacctgataacagagacaggaaaagtaggactaaggattcacttacccttggatcactgtgggaaagcaggcttcacagcctttgaaagaacaaccaaagattcacatctcagctgtgttccagggcatcttagcactcaattctgtggagcagtacattaacacaaagcaagtgctattgtgtggacagttgctgtctgtgttgccacttacatacttagctttgtctatctctctcctaagtagatggttttacatggtataatgatgggaaagggtagacaggtgtgtctttcagtgaaatcgagaagaggtggacaccctggctcaagagccttttgttctatgcttgatgaggaaactaagtgacatgaaactgcttgagatccagttctgtttttttaacttcttgacttttatccatgaaagaaatatgggcactttggggctggagagattgctcagtgttaagagtactagatgctcttccagaagacccaatttcaatccccagcacccagatggtagctcatgtaactcatctgtaactccagttctagggggtctggcaccctcacacagatgtacatgcaagcaaaacaccaatgcatttaaaaataattttaaaaggaaatatggacattcaaatatacaaaaattcatacttctaaagacacaaagagtgagcctggaaatgttctaaaacacaaactggaatgttttaacaaagagctgcttaagctttagaataagggcattcaatttctgtcttagtagcctgaataaaaacattgcttttttccataatagtctctgtttacacgtgggtgtttacacatgggtgacaacaatttaataatccccactgaaactacaccagcagcggtggaactggccagctgatttccactaccttgcccaactgtatatttagctctcataatgagcctgagactaagggaccatgacatgacacaggagcccagggcaaaattttaaagatagaaatccaagagatttcttgtattgcctctaaagcatttggacaccagccagcatatgtcaatatgtgtgaatatgtgtatctgcatgctttgataacattttaatgactcccattgaaatagcatgatcaaagctacagtcaattactcctgcttccctgtccagtgacattccctttgccaggtttacattaaacctgaggctgagggattcaagtataagacaggagcacagcagaagaaccttaaagatgtaactccctgagtttgctgtcaaggcaaatggatcaaggacactaagatagtcaatcaatcaaaaacacatcttttaaagactaatgtcaacaattgttgtaccctggacccaatatatcattttatctttagttttaaggtaaaggaagtaggtaaagatactcggctgctagttaagattgtgtgcatattgaaatagagatgctgtagttgattgtgtttaactaatttaaatattttccagggatactaactatttcagaccaaagacaatcttctcgatgacaagcaacaaaggtaggtgtcaagtactggaaggggactttgtgttaagaattcagatggtagcctgggtctgagacaagtcattaggcaagtgttgagagcttttcaattgtttagtgtgtggctgccacatgttaaaatcaatgccaaaagagctttctgataaatgcagttcttcagatttttttttagatgacctcataatacaacatgtaaagatacatgtgttgaactggagggaagagagaacaatgtttctccagtgtgtttctgtatcctcctgcttataaactcttcctttcacaaaatacaaactcagtaagtagtatgcttagatcaaccattcattgaggtgacaacacctgagaaccatggacttcaatcatgaaacaattactgctggtgtaaggaggcaaggaatgatgttattaacaaaagtccgctttcactccacactcacccctacctcactagtccactgaaatgcatttctctgtgctctctgtgtggctgtcatttcaccaggtattggtattatttctctgcttctattattggaatgcatccagacagtgacaaatttttgtctccactgttaaaatttaaagcttcctgtaacagcccaaaataaagccctactgtgctttctctggcactgggacatcattggttggtccctatggctgttgatacactgaagtattcgtatttccatcagactgaacattgctccagaataagcccttggctgcgcttgtgtgcaatatagctatcataagtacagtcccaactgtcctgaaaggactcaaaaactgtatgagaaaagactaaaggacgtattgattaaatgtgtatttttgaaattcttaataaactcagtgtcaggaacacaatcaaaactaattcgggggagtctggctctattttttgaacatgagcttttggtgcacagttttaggggtgctgcagatgtgtgagtaagtggagttgtctatgatgtagccaagtttatctggaaactttgtgacttttcaattaaatagccagtcaggaagtgtttttctaatgtcttcacactaaaattgagatggagaaatcttcttcatcagcttgctgagtgcctaaagagtgattgttccaatggctctggagctagatgtaactacatttaaaactgaatcccaacatacaagtgttgcattttggtgaaagtgtagtctcttttcatctcttcgtcatctacagggactaagtaaacactgcttcatcaagaatgcataaaagaaccaaccattcacctgaaaacttaggcttgagacaaatagaccttccgggtcatcatgagtctcctactgctttttcccaaaacctacaaatggacctgctgatgatgccaactggagagagggagcagaaacagaaaagggaagagtcgatttctagttgattcctatgtttttgacagaggctaaaattgggaacctgtattcagacccaggaagttttatctttttcagtcctatagtatgtcacatgagtctccccctactacctcctacacaaacacagattcgcacacacaccacaagcacacacaccacagacacacacatatacaccatacacacatgcacatacaccacaaatacacactcacaccacaaacacacacacaaaccacagacacatacacatgcaccacacacatgcatacacacagtttcctcctcttccctatttgctcaaactgatactgttgacagctcacagttcacagtcccatcattcatttggttaatgacaaaatgagaagggggggtgaaactactccttcagccctctcacagtagagggctcagcactccctgtcactaagcacataaaccctgcctttagcaaaaaactaaatgatctttcaggagaattgcagacttcctatatgttcatatccagtagtctccctgtacgatgtagaatacagcggcttaataataataataacaaattaggtaaggataacttgaaagtggtccttccactttttcttagggaaaccagaatctttgaccctcaagtaacaaaactgacaaagagaattactaagatctcattaaagcaaaaaaaaaaaaaaatgaggggagaaagggtttaaaccattggaagtttgatgccaaaagcatcaaaatgaaccatggttaatttttctaactattctaagtgtcacaacttaataggtttgctttttcaatgttgctctctagagaaaaaatactaaatgatttctatgggttagtttaattatcaaattaactgcaatatttagaatgtggacaacaatctatttcaggtgctatagccacgaagaaacgcttctgattgtatcctaggagcttaggaagacaagataaatagccttaggcttaaaaaaagaaaaaaagaaagaaaaagggtaattcaatggagatggaaaactataccagagtcaaagaacttattttccttggcctgacccagagtcaagaagtgagtgtattactgtttcttttctttctcctggtgtatgtgacaactctgctggggaaccttctcatcatggtcaccgtgaccttcgagcctcgccttcacacccccatgtatttcttgctcaggaatttgtccattgccgacatctgcttttcctccatcactgcacccaaggttctgctggaccttctctcacacagaaagaccatctctttcaatggctgtctcactcagatgtttttcttccaccttattggaggggtggatgtgttttctctctcagtgatggctctagatcgatatgtggccatctctaagcccctgcactatgtgaccatcatgagcagaggccgttgcattgggttaatagtggcctcctgggcgggaggctttgtccactccatcgtgcagatttctctcttgctgacacttccgttttgtggacccaatgttcttgacactttctactgtgatgtcccccaggtcatcaaacttgcctgcacagacatctttgtcctggagatgttgatgatttccaataatgggatgctcaccacactgtggtttttcttgctcctggtgtcctacatggtcatattactattgctgaggtctcagtcaggagagggcaggaagaaagccttctccacctgcacctcccacatcaccgtaataactctgcacttcgtgccctgcatctacgtctatgcccggccattcactgccctccccacagataaagccatctctgtcaccttcacagtcatctcccctctgctcaaccccttgatctacactctgaggaaccaggagatgaagtcggccatgaggagactcaggaaaagacttggcccttctgatggaatagagaagtaacatctgcctgttgccactttaaatgtttctagcataaataaactctattttctatgttgccttctcatttctcttattctgatatattaagacaccagaaaaaaattgtcaagttgataggtctagttctcctttacatttttggtgtttggaatcatgcctaaaccactgaggctgtaagtaaatcttgctgaaatctgtagtattgaaggatataaacaaatgttgagtatgattccaaagtctagtaaagtctttagcattcatttcttttcttttgttttattttttgacataggaactcattctgttgaccaggctagactgatactcactatgtaacccagggtatcttcaaaacatcaaccttcttgtacttgctaccaagtgctaatgctgtaggtgtgtgccaaaacataaatatagtttcaattacttaactccaactttgtttttgtgtgccaatggggctttatttatagacactaaaatctgaatttcatagaactttcatgtatcaattttagtttttaaacagaaatttctttagggaaaccaaaataactagaattgattaatcaaggtgtgctgcaattttacctacctgaggatcgttgtgcatctatctttatgatgttacaatcaaaagagagactcaaaaactttgttagaactcagttgcagcccaaagcaaaattaaggcttctcaaaactcatttcttccaagctctaatcatcctattttataacaatgtgcagacagatatctacagagtattccaattaaacatcaaagaatatacattctactctgccaaagaatgtacatactatactgcaagtcatggaagctttcccaaaatataccacatcctgagacatgaaaaaatcttacaaattgagagaaatttgtaaaatacatgaaataacatgtatcttatctgaccacaataccataaaatttaaaatcaacagcaaataaatctctagtaaatttaaaaactcatggagatcaaacaacacatttctgaatgacaaatgggccaaacacaaagatattaaaattttcctggaaatgaaagaaaatgaaaacacaatgcaacaaaatctctgggacacattaaaaacagttctatgagggaatgtgtagctctaaacatttacatttaaaaatcagaaagggcgtaaataaatgacttcatggtgaaactcaagaatttggaaaaataacaatccaaacccaaatccagaagattgtaagagataataaaaaacaatcaaagcaggaattaatgaattggaaacaaagaaaacaatacaaagaatcaataaatctaagagctgattcttcgagagataaacaagctcaagcaacctttgacccaagtacccaaaagaaagagaggactcaaattaacagggaaacattaaatgaacagggaaacattacaagagacaccaaagaaattcagaatattatagagatatactatgctccattaagtagaaaatctaaacaaaatggataaatttcaagattcatacaaactatcaaagttaaaccaagaagagatcaacaacctaaacagacccataacaaatgaggagattgaaaacctaataaaagcttcccaactgaataaaattccagacccaggtggattcacagcagaattatactgaactttcaaaaaagatctgcaactaatatttcttattcaaaataatctcaagccgggcgttggtggtgcacgcctttaatcccagcacttgggaggcagaggcaggcggatctctgtgagttcgagaccagcctggtctacaagagctagttccaggatagcctccaaagccacagagaaaccctgtcttgaaaaataataataataataataataataataataatctcattttaatgaatggttatttaaaatttgaatatctataacttctataaccccagttccaagagattttactcttcctctgtcctccatacacaccaaacatggaggaaaaatacataaaacaaaaatagatgaatctttttctaaaaagaataacaggtttaaaataccaatacctactttttcaatatacaaagattatggaaggaatatattttaaataccaaaatataaaatttgaaataattaaacattactaattaatttgaaaataaaacatataaatgattttctttaaaaagtcagtgtagtattattttcggatgctgagagaaatgattttcagctcatgagtctgagtgggcagaactatgttttgggaaggaaaaatgtttgatgaggtggcagtagactgctctcctttaagactcatgacccccatgcacaaaacttaagtgcaaatggatcaaagatctcagcataaatccagccacactgaatcttctaaaagagaaagtgggaattacccttgaacaaattggcacaggagaccgctttctgaacattacaccagtagcatagacattgaggcctgcaattaataaatgggacctcctgaaactgagaagcttctgcaaggcaaaggaaacagtcagtaggacaaaacgaccacccacagaatgggaaaagatcttcaccgatcccacatctgacagaggactgatttccaaaatatataaggagctcaagaagctagccaccaaaacaccaaacaatgaaattaaaaagtggggtgcagaaatagagaattctcaacagaggaatctgaaatggctgaaagacacttaagaaagtgctcaaaatcattggccatcagagaactgcaactcaaaacaactctgagataccacctcacacctgtcagaatggctaaaatcaaaaataccaatgacaatctatgctggagaggatgtggagaaaaaggaacactcctccattgctggtgggagtgcaaacttgtaagaccactctggaaatcagtatggcggtatagtaggaaattaccaatatggagtcaggtagaaatataagggtatttaatagggaaaagccttacttacagagcgaaccagccagccggtggtagtctgtacagcaagcagcaaaaagaagccgaaaccgaaaatgcagaccccctactcactctgaccacaccctcacaagccctcaggtactcctgtagccagcccctaagaaggcgtggctacagcttcccctacatggcggttgctcagaaaaatgggaatcagtctacctcaagatccagccattcctcttttgggtatatacccaaaaagtgtatgttcatacaaggacatatgttcaaccatgttcatagcagcattggttgtaatagccagaacctggaagcaacctagatgcccctcaactgaagaatggatagagaaaatgtggtacatttacacaatagagtactactcagcagaaaaaagtaatggaatcttgaaattcgcaggcaaatgggtggaaccagaagaaaccatcctgagtgaggtaacccagtcacaaaaagacaaacatggtatgtactcactcatatatgaattttagacatagagcaaaggattaccagcctataatcctcttcaccaaagaaactaggaaacatgaaggactctaagggataaatggtccccaggaatggaagtggcatgaactcctgaactaattgggagcatgagggtaggggggagggagctgctacaataagggcaagagaagaggagtagatgagaggaaatggaggagcagaaatattgagtttggggaaggatagaggagaaagagcaggatgagagataccatatcacagggagccactataggtccgagaagagatctggaaccagggagatctccagagacctacaaggatgacacgatctgacaatccaggcaatggtggagaggataatctaaaagcccttcccctaaaatgagattgatgacttctctttatgccatgctagagccctcatccagtggctgatggaagcagagacagacatccacagatatacactgagctgaaatgtggaatttagttgaagagagggaggaatgaagagtgaaggggtctgtaccaggttggagaaacccacaggaacaggtgacctgaacaagggagagcacatcgaccccagatgctgtctgggaggccagtacaagactgatccagacccctgaacatggatgtcaataaggaggcctctgcactccagggagcctctggtggtggattagtatttttccctggtgtaagaagggaatttaagagtccatcccacgtgaagggttacactctggccctgaacacatggggaagggcccaggaccagcacaggaagacttggtggactttgcagagcccccactgagggtcctaccctgcctggggagtggtgggtggatggggtgggggtaggctgagggtagggaaggagggatggggggaggggagggagagggagaagggacttacatgtgaaacaagcttgttccctaactagaactaataaataaatttaaaaaaaaaaaaaagactcatgaccttactagtaccgagaattggagtaagctcctgtgtcaggcatgatttccctcctattgagcaagccttaagtccaattagacagctgttgatactgccaagatatcaatgccaccattgcgctcttagtactgtcttatcattcttgtcactgttttgtatcacagtctaccaatagctaggtaggactactgattcacaattcccacaccaaaggctcagggaacatctcagaagaagaggtggaaagattggaagagccagaagactaggaaatctgctgtgagacggtgtctcctagaaatgaccgggaagctgcacccatgatacctcaacagtgtgactgactaaaacagacccgaacaagtccaacaccaatagacatgctaatgtgaaaacagggaatttcatagggttccaccaatgccaattactcaaccctgaaatcacatacacatgagtaactcttaacttgctgaacaagttgtatttaaatatctattcatatatatgtgtcaataataattaataaaaaagagggcatgaatctgagaaggaatggcagaaggaacacgggaagggctaaaggaaggaaagggaagaaggaaataatgtaaaaaatgctgtaaaatgtaaattgaattcagtgtgttatccgaaagaaaaaaaaaaaagaggctgtggaatcgagaaagagcaatgtattcggggcaaatcctgggaaagttggactgaggggatcagggatgaatatgatcaacatgctctgtatacatgtatggaatttttatagattttttaattgtatattttagaaaacacaaagtgcaatgcactacaaagtataaatggaggacaaaatagtatgtttcaagataacaagaatcaagaaaatggtttcccattaactcttgagtaatgaggagaagagttggctttcattaaagaaatgctgtaattctcctacctgtttttcaggaagggagttgaagaataaatatgttgattctattgctcctgctctattttggagtgggtggtattttaggtttttgtttgtttgttggcagggtctctatgtagcgatggctgttctggaactcattatatagaccaggctagccttgagctcacagagatctgcctggttctacttcccaagtgctgtgattgaaggtgagtgtctctgtgctctgccattgattttgttttaagaggtagcagtggaggagacatttataggtaaatttgatcccttcacgtcttcttctatataacaatggaacataggctgttcaccatctcaactgtggtactggtttcacaagtgtctaaatatttccacacttatcaattctatacaataaaaatgtactttttctttatatggtaataggaccctaaacatgagtaaaatagatctgtggttctcaacctgtgggtcatgacccctttgggggtcacaaatcagatatcctgcatgtcagatatttgcattatgatttataactagcaaagttacaaatatgaagtagcaatgaaataattttatgattgggagtcattgcatgaggaaatgtattaaaaggtagcagcattgggaaggttgagaactacctgctgatgaaaatttgcatatagtaagaagtgaacaaataatatttttaacttcatgtaagctctatattcaagtcttgcaggggagttatctcaggataaagagaggaggatacactagaaatgttcttgagcttggaatagccttctttttctcattttgttttgttgttgttgttgttgctgctgctgttgttgttgttgtttttactttttgagacaaggtgtcatgtgagccaagctggcctcatactcattaggtagtccagtatgatgaccttaaacctctgacccctcctgcctcccaaatgctgggattacaggtgtacgccaccacacctagtctacataccactacattcagtttatggagtgctgggcactgaacccaggtcctcatgtaagcaaggtaggactctatcaacacagctacacctacagtccctgttacagttacttacttttcagatctagaactaaattgtgttcataaaagaaactcaggggctaaggtttagctcagtcatacagcacttgcccagcatgggtgaagctctcagttttaccaccggcaccaaccaataaataataataaactgtacaattcaatctctatagagcattttctcaatggcaggcgtatggcccaaccttgcccccttctgctgtctgaacactctctgtgagcagatcacatcagtcctcttctctaacacccaagtgtctcttcctgtactcgaagaggaaaaaccttgcacgaaaagaccatttgatggctctaaggaaaatggccccccataggctcatatgctggaatgcttggtcccccagttggtgaaaggattttgggagagattaggagctgtgacctagtggaggaggagtgtcactagatgtgggctttgcagctggtttcaaatgcccccggccattcccagtaagctttctgcctcatgcttgtggatcaagatgtgcacccttagctgctgctctcacgctatgtctgcccgcctgctgcctcccgccatgatgaccatggactctagccctctgaaactggaagtcaccagataaactcttctgagggttgccgtggtcatagtgtcatatcatggcaatacaaaagcaacttaatacaattcacatggctgtgccttcttgcctccatacagtctttccatgtgttcttcccacacaaacaccacctcagtcagagtggccacattcctaccaagtttcaccattcttttactacactttgggacaatagcttactactaagttaccttctattcttactctggtctattcttctttataatgctttttatcttctgaaatagcccagaatcgtttttatcttagcagatacttgtatcttcacactggaatgtcagtgacatgaagtcaaggctatctgactcactgtctcatgtctggcatctagaggtgtataataaatagtcgtcaatggcgttttgctttttagtgaaaactagattttacacattctgcatggttttgctgccatgacttttttcaccatggtggatcctctcctcaaagtgtgagacaatgaaaccctttcttctttaagctgtttgtttcaggtgttttggtgtagcaacaggacaagcaagttgagagtttctatattttgtgaaattattacttaacgtttggactgtttttgagttatctctaccctgtatttttcctgttcctcttttttaatctatttctttttccatttgaatgtagtatatgactaatgctctattttcatttccattgctatgattagcctgacaaacttagaagaaacagggtttatttcagcataaaattccaggttacagttcataattttgaggaagttgaacaaggaacgtcaaacagcttgtcatatcacttccacatctaagagcagagagaaatgaatacatgcctgctcacttgcttgcttacctgtgctcacctcaaattcccccactcttatgtaagtcaggactccctgactagtgcatggtaccacctacagtggtcttcccacattaattaataaaacagtcgcccacagacatacccacaggccaacccaatatagccaacccttcattgagaccattttcctaggtgatctagattgtgccaattgacaattaaaactaacacactttaccatttgtcagtttgacacacaaacacatcacttttgcacaacaacctttaactgcttgtccccacagtctcagaagtttttttttttttttcataatgcaaaatatagtccaaccataaaaagccaaattttctctaaaattccaagttgcttaactgtggcctcctataaaacttttaaaaattatataattctaacatatgatggcacagagtaatattcttatttcaaaagggaagaattggggcatcacaaggaacaataagagcaaaacaaagtcaactctagcagggcaaataccaagtcctatagctcagtgcccagcatctgaggcttgtttcctgggctccaagcagcttgtattattccagtaaagtatgggacatttcatgtcactggtcttcttcaataccagcctgattaacacacaggttcttagccaaagtatcatgtgaacagcccttgtctctgttcctgatagactctccattgctttctaaaagcccatgaaccaggaatgaactgtccacatttatctcatgattcttatatttcaagatcctactaaaatggcccattaagcatggtttccaatattcactgggttttccaccacataccaaatacttccacattcttctcagaaaaaaaaaatagttcaagcgggaactggggagatggatcaattattaagagcacatgctgctcttgcagatgagctgggtttgattcccagcatggcacagcgaaatctgacaggaacggccaaagtcataaagccaacacagttgcttgacaaagatccagcaaagctgagcaatatgatggctgctgtgccacttttggttttgatctctgcatgttgcatgcttgtggggcttttgatatttgtataacttttgggatattggattggtgggaaatttcttatgaatcatttatgccttctcctagaaatactgcttctaggcttccccaggaaagtcctgagcatactacccaactcatttgagggagatatccttatctacttgaaggtcttccttacccctttattattattctgcacagcagtagagttagtaacagtagagttagttgaacaattgtatcaacttatctgtatcagaatataaacttaggtctacctgactctccccaaatgatagatttaaatgggaaaaatgggtgagaaatggttgacaggtgtatccttataagcacgatgtataacaacttgaatagacatacataaaagttcaagaaccagaactattttctgcttgttaaggaaataaagatctctgagactgtttagggctcaattttcttttctcatatccggacagcctcattcatgatatccatcacaacatatatacatacatatacatgcgtacatgtagattcagacatgtatattcaaatatacaattttatgtatttgaaataatgaaataagaccctggaatgtttttagtcacacaacctgacatgtttcaataagagccaattaagctaagaataaggggggttgatatctcaattggatacagaccaaaatgttgctttttttcgtataagttttctgtgtgtttacatgtatgcattactttagcaaattttaataatgcccactgaaactccatcaccaccaggggaagtagccagttgatttccacattcttgcccaacagtaatcctctgcctagctcttataataagactgggactaagggaccaggacactacacagaggcccagtgcaaaaaaattaaaaggtaaaaatcaaatattcttttattgcctctaaagaattctgaacaccagacaaaatataccaatgtgctcacatgattgtttgataacactttaatgaatcccattaaaacaacatcaccaaaactaccatcagtctgatgctgttacttggctgtcaagtaatatcccctttgccattcttacattaggtctgtagctgagggatttgaacataagacagggacacattggcagaaccttaaagatgttccttgtgtttgccctttctctcctgaaaatggagaaagacactaaaacacccaatcacccaaagatcttttccttcagaagtacatttttaaataattaaccatatcaattgttttgcactgtacctaatataaaatttctcagtgaaattttaagagcaaaggaaattgataaagacatgaaatttctagctaggtttaaggtcatacatattaaaattgagataccattgctgtgttttaatactcggattttgagtgttttctagagatagtaaatacttcagaccaaaaatgatcatttcactgacaaaacaaagatgactgttaagtactgaaagggagaggtattaagaagaaagcagaactataatgcactaagtataaggagtctttttttttttttttggagtctttctgtatttgttgaaagcctttgagttgcatagctctgtggctgacacgttaaaatcaatgtaaaaagagtttcttccaaatgatattcttcaaatgctcttgtgatacaagaggagaaactacatcgattgagtctgtgcagcggggagaaaacaatatgtcttccattctattagagtttgggagagaagccacaagacaagcaagctataactcctggcaactgcaggaagaaatgataagagagcaagacagagtcatgcctttgagttagagcaagccatggagggctgcatggggatcttcagagaaaagtgtgggaaaccctgagtgtcagaagaagcatgcttagggtcttggtcagcctccaaacacagagcagaaaggaggaagaggcaagttatgattcctgacttagaagttaaaaagcaggcaggcttagcagcaaaatctgcaaagtaacataaagatacatcatgcgttatatctttaaatgtgcacaaatcattctcttaaactacaaacacaccagcaatatcatcaaatttatgtttaaacatcttaattttaacatatattaattatacttattaatgggatttaatgtggtaacacaaaagcttgcagcatgcattaagtccagcctccttttttttctatttttttattttatttttttctccctttccctccccttacccccattccttctcccccacctccaacctaccccccaccccatccacccaccactccccaggcagggtagggcccccaaccggggctccaccaagtccaccaaatcttcctgtgctgggcctaggtccctccccatgtgttcagagacagagtgcatcccttcaagtgggatgggctctcgaagtcccccacatacaccagggcaaaacgccagtccacctccggaggctcccaggagtgcaggggcctccccattggcatccatgatcagggggctggatcagtcccatactggcctcccaaagagcgtctggggtcgatatgctttccctttttcaggccaactgtttctgtgggtttctccaacctggtacagaccccttcgttcttcattcctccctctcttcaactaggttccagaattcagctcagtgtatttctgtggatgtctgtctctgcttccatcagccactggatgagggctctaggatagcatagagagtagtcatcaatctcattctagaggaagggcttctaggccatcctctcctccactgcccgaagtccagcctccttttatctacctttaatacacacaaacacacacatacacatgtgtgcacatgcgcacacacagccctctcaacctccattaataactattctactttcagaacatttttttaccttttatacccaaaaggtagaacatgattgttgtggtttgaatgaaaatggcccccagaagcccatagggagcaacactattaggaggtatggtcttgttgaggtaggtgtgactttgttggaggaagtatgtcactgggggtggaatttgaggtgtcagaagctcaagccaggtccaatggcttactctgtcctcctgctgcctgcagatccagatgtagaactctctgctacccctccagcaccatatctgcccgcatgccaccatgcttcctaccatgatgatactggactaaacctctgaactgtaggctagccccaattaaagtttttccttataagaattgtcgtggtcgtggtgtctcttcacagaatacaaaccctatctaagtcaatgacccactcagctttctgggtctggtttattttgcttagcataattttgtccatttccatccagctatctaaatatatttgaacatttcaaaaatattctgtgtacaaggaagaaaactactacaatcctaaaacttccttaatgctgagtgtggtaatataaccctctaataccaatatctgagaggctgaaacaggagggtggaaatttcagagccacacggggcttcatacatagtatgactctataattctcagatatcaccaataacatcttataaaaacaaacattattctctactaagacttattataatttatttgtgcgtctgtgtgtgtgggcatatgtgtatgagtggccatgggaccatgagaaagcactgaacccctggagttaacattacaggtgtttgtgagctgcccaattagatgctgagaaccagactcaggtccttttcaagagcaatatacacctttaactgctgaaccatctctccatcccccagccattagcttattcaatgccccttacttattatgaccccatcaccatagcagccccatccaaagaggaaaagaggaagaagcatggccaggacagtatggtgcagtaggtcactctccttttctggtctccatcctcaaacaagaagtgcaaaattccatcacagttctcaggacattctccaccatctgctcccaaacacgagtcagagttgagggccaagttatcaagggaatccattgttccctctccccatgaagaaacattttacagtcttgcatgaaaccagagtccagtaggctttgatcagttgttcatcaacaaaacaatacctaagaaccacagaatgtaataataacacacttactactgagttaataaggcaagtcattgtctgtgactaacaaaactaaaatctcctttcaccccacactatcctatactacaactgcatgacaggtttggtgttctgtccatagtcatgttattcacaactggatcagccttctatgaattcttttctttgtattatacatttctgcccctgttcctagtaagttagccagcctataaggaaaatgttatctcaatcagcatcctttcagaaccagccctagataaggctctgctgcaccaatgcactgggccagcattggttccaacagctattggtgcatttgaatattggtattttccatcagactgaatgtgtgtgtgtgtgtgtgtgtgtgtgtgtgtgtgtgtgtgtgtgtgtgtctgtctctgtctctgtctctgtctctgtctctgtgttgctagaatacgtcctgtcccgaccttgctgttaagcataataaactgtgagaaaggagtgaagggctcattgaatgtatgcattcccactctctaataaacatgcatcaggaatgcaactgaaccaaactcaggaaacatcagtttcttctgcagtgttactgccgtgctacagatgggtgagagagcaggttgtgccaggtccgagtctatctggaacattgcgactttttaaacaaatagctcatcttggactgttttctgctgtcttttctctaaacttgagatgaaaatttagttaaatcctgctggactgtaagaagtgcaatgaatggctttggagctaaacaatcacatctttaattcagtctcccagtgtactattgttttgagtttggagaaatgagcttgcttttcatctttctctccttatttatggaataagtaaaagcctcttcttcatacagacatatgtactacaaccattcccaagacaccttagcctttgacatgaagagactcccaagggcaatacacacccacattagagccatgaagctacacctttctgtcctgctgctctcttgtgagtctcctcaacccctgtccccttgattgatgtcatctacaggttcacagtcaatgaaagcccccattcagtgagctgagggcagaagagggaagaggttttttaaaagtgctccaatgtctcctaccaacatctctgtgctgcttctcccactctgtgcaaacttagactctccctttaatgaaaataaatcatcttccagagaatttgcagaatctcctgtgtttttctccaagtgccttcctggacgatgtagaaaacaactgataataatttcaacaaatgagggatagttaacctaaagatggtcttttcacttcaagctcctaggaaagccagagcctttgaccctgaatatagtgtaactcactaggagagttgaaaagatcttactaaagcaaaatggagacaaggttcagttcgtgctttggaagtttgacaccaaagcatcaaattaaacctttgtcaccttgtggtgagaggagagcatgaacgacagtggccagatacacatggatggcagaggccagaacaagatgtcttatgttttcctctattgctctctgccttattgccttgagaaagcagtctcttggtgaataggaaactctacatagccatcagaattcacctgtctccacccccaatgcttgagctacaggcactaacagacatttctgcctttttatgtaggtcttgggaattaaacttgggttctcaccaataaggcatcaccccagccactaatgcctttgataatttttattttgtacaaatgctacctaaggatgacacgatctgacagttggggcagtggaggagaggatggcctagaagcccttcccctagaatgagagtgatgactactttctatgctatcctagagtcctcatccagtggctgatggaagcagagacagacatccacagaaatacactgagctgaaatctggaacctagttgaagagagggaggaatgaagaacaaaggggtctgtaccaggttggagaaacccacataaacagttggcctgaaaaagggaaagcatatcgaccccagacgctctttgggaggccagtatgggactaatccagcctcctgatcatggatgccatcggggaggcccctgcactcctgggagcctccgaggtggactggcgtcttgccctggtgtatgtgggggtcttcgagagcccatcccacttgaagggatgcactctgtctctgaacacatggggagggacctaggcccagcacaggaagatttggtggacttggtggagccccggttgggggccctaccctgcctggggagtggtgggtggatggggtggggggtaggttggaggtgggggagaaggaatgggggtgaggggagggagagggagaggggaattacatgtgaaacaagcctgttccctaacttgaattaataataataataataataagagaaaaaaaaaacaaatgctacctaagtgtcactatatactatattttcattcccaacagtgctcagtaaaaaaatgattctgcatacaataagttgatgtgatcaccaaattacttgcattctttaaaatgtagacaactacactaatttcagtatataaattaaagttattgactcaatataattaaatattcatgtattgaatataatatattgaaatatattgtatatactgaaatacattcaatataactgagtaattatatattgaaataattgattcaatatattgaacatatatacatacatgtgtgtatatgtatgtatgtatgtatgtatgtatgtatgtatgtatatgacccagagtcaagaagtgagtatattgctgtttcttttctttctcctggtgtatgtgacaactctgctggggaaccttctcatcatggtcaccgtgaccttcgagcctcgccttcacacccccatgtatttcttgctcaggaatttgtctgttgccgacatctgcttttcctccatcactgcacccaaggttctgctggaccttctctcacacagaaagaccatctctttcaatggctgtctcactcagatgtttttcttccaccttattggaggggtggatgtgttttctctctcagtgatggctctagatcgatatgtggccatctctaagcccctgcactatgtgaccatcatgagcagaggccgttgcattgggttaatagtggcctcctgggcgggaggctttgtccactccatcgtgcagatttctctcttgctgacacttccgttttgtggacccaatgttcttgacactttctactgtgatgtcccccaggtcatcaaacttgcctgcacagacatctttgtcctggagatgttgatgatttccaataatgggatgctcaccacactgtggtttttcttgctcctggtgtcctacatggtcatattactattgctgaagtctcagtcaggagagggcaggaagaaagccttctccacctgcacctcctacatcaccataatgaccctatactttgtgccctgcatcattgtgtttgtcctcccctctgctcaatcccttgatttacactctgaggaaccagaagatgaagtcagccatgaggagactcaggaaaagacttgaacattatgatggaacagacaaataaacagctcctgcctgtcaccatgtttgacaatgtttgcacctcacacacatacaatctactgatttctgcttttactaagatacacttgactttcaaagatctcattggtatgatatttcatgttacaaaagaaaattttaaattaaattgttagctgggaatttgatatttctttgcaatacagccttggaagaaatagaggaaactgaatcaaacaacacattccagcactgtgaccaggaaagcaattaagacacatattagaagcacaatgtaccaggggctctagaactttgcagtgtcttccgtgaagttatcacatctatgaagcaacaaattcaaatttctcctacaaatcactgtcaattgaagacttttaatgtaaagcccactgtgatgattagctttatcccaagctagactcactctcgaagagagtctcagtgatacattgttcaatgatgcaactagagacaacctaagcaacctaaacagcaaaaacattttggattattgctcaaagcagaaaatacctttgagtccatacagatataaatatttgatatgtaagtaaattcaggtgcttgtgtgcagggtttcaaataatttacgaagattccttggaggcgggactagaatgtctccctacaattctccacctgaaaggctttgtgatctaactcccaactccacaggtgacagttagggataatctcctcctgatgtagacaaaagggtagcaatgaaagtaaagacctgaagaagcctgaaaaacattacctgtatctggaatttaaagttaaaagcatcattgataaactttggccacagtgtatgtgccctttgatatgattggataagaattatattatatgccttaccccaagattcatcacttctgtctaactaaaagaaaataaacctgacactaactctgatttagagacattctacaaaacccctgagcagcactctctgatgctgtctagcaaaaaaaaaaaaaaaaaaaaaaaaaaaaaaaaaaaaaaagtctgagaaactgtctgagcctcatagagctaaagtgacatggccactatgagtaatctggtatcctggatatgatcctgagttagaaaagaactaaggaaacctaaataatgtgtgtttcctaaataaggaaacctttaatgagtcatgcaggtgtagagaaaacacctgtgttgttgtgatcgggttaatcctgaatctaatctcttcttcaacaaatattcctgcaaaggtaaggactccatctgatgacctgggacactgctgcatcttctggattaaattctgattgcaactgggaagcaacagctgggtctggactctgagtaaaattcagggacatttccagccatagaaagaaattgagccatgctgcctggaggctggctggggccaaaggaaggggaagccatgaggcagttctgtgctgttgacctacaaggaaagcaattactgccaacaattagggtaaagggccttaaaactgaaccttaaacctacagattttgccaagcatggtgatgcacgcctttaatcccagcactcaagagaaagaggcagacagatctctgtaagttccaggccagcctggtccacatagtgagtttcaggacctatgcaaggccactgtccaaaaaatttagatcctaaaggtagccaaacaatcaagatatctattgaatgggctcatatttgttgctaacatgctttattaattttttcttagtctaagtagcccctgttgtggaatatttgtttatactgtgaagacatgtctttatcaatgcaccttctgattggtttaataaagagatgaatggccaatagctagcaagaagagagattaggtaggacttctggagacaaagacgactctgagaagaagaaagtcagagtcaccagccagacatggaagatggaagagaggtaacaccacgtggcagaacatagactttaaaacatgggttcatttgagctataagagctagttgagggctggagagatggctcagaggttaagagcattggttgctcttccagaggtcctgagttcaattcccagcaatcacatgatggctcacaaccatccataatgagatcgggtgccctcttctgacctgcagggatacatgtagacagaacactgtatacataataaataaataaacttttttaggagctagttgagacaagcctaagctaaatgccaagctttcataattaataatagtctctgggtcattctttgtgggctggtggtccaaagatagtccaacaggaaagctttctacaagtccccatcctgcttcaacctcttcccaacacaaaggatgcctttgaacaaaaactgctgagttggccttctcccaaacttctcctctttttttattggagttgggacacagagaactcacgcttttagatacactatgcaaaatgtgtattcaaagcatcctttgctgagtagcatcttaattactcccactgaaacaacctcaccatcagcagaacttttacacggtcacatccactataacccccctgataattctcatgttgtttatgggacttaaatgtcagcaattctgatggaacacagtatagcagtgtggaagatccaagaaaatgtcattcttagagtctgccctttgtcacatcaataaaaggggaggtcactgaaatcagtggccttcagaaggttcctaagagagccttctgaagcaaataatctccagggctcatgtgaacattgcttaagatgttggagttcttgaaaaaagttcaaagatcttaggtaagtaatggaattctatagctccgtgagcctgtggtgtcctgtgtgtacaaacaggggtgagaaaggaagagtgagatatgttaaaatctgaatgtaaacccctgaacgatgtgtgtacaaaagagcctacattagtaattaacacaggttagaaatatttacactgaaataagacacatggagaggaaattggttcagaacgtggtgaaagttattctttgttgcaaaaaacttcttgagctgtattgggatgttttttcctcaggcattttatttgtctgtgtaggtggatctcgtctgactgaaatctacagaggtaattcttatactaaattttaacctaaaaacaaaaataatatatctcaaaccttcaaacaacttgaaagactaatacaagaagccagagagatggctcagcaggtaaaggcaccttcctgtgcaagcccaatgacttaaattcaatccccagaacccacagaaaagtggagggagagaagctgctccacaaagttattcccttgcctccacttgttacagtgcacacacacacacacacacacacacacacacacacacacacacacacacaccaacgataagtaaatagttaaaaagaaataattttttaaaaactaataaaaataacagctacagcccttaaaatttgcaaaaagaaaaaatattacagcactgaatacctttgtgttcaaaccatttctacccagaaaaaactccagtccacaagaagctttcagtacccaaactgtccccgtgcccaccttcttcccattcccatgggtctcaatacagtcatcacctcctccatgcagttttcggagcccactagtgaaaacccctccttctgtcacacatagtgactcatctatcttaaggtggccccttcactcccaaataactgttaggttttcattatttttcccactatgtatagattctattctttttcttgaataacctagaattctgccaaggctccatcaataaatgccaaataattaagtggattaaaaatcacaggatggagcacaagttggaggaggttaaagaaaaactggttctgaacataaaacttaaatccttaatttgaattatggcctgccttcttgcttcccacggaccatggtgtgctgtgtagacggaggccagaatggaaggttctgatggctaagttggtctcctttatgtctctgttaactatgcagagttggtattttctagtgaccatctctcttaagccaagcatttatagctcagctaccacttggctgagctaagttaatcagcatagcctatatgtgaagacctttacatattactctaatccccaccgacagcttcccttcatcatgatctgcattccacacaaatggactctcagtgaggccacacacttgcctgtctctcacagacaaaaccaggtcgtaagccgtagtgacttttgctccagcggccctgaaactaagcatgtgttcttttcatatgtgatgcccaccacaattcgtagcatccactgcctctgaaggaagtgtatgtcctaacttccttacgagggtgtgctctgataaagttgtttgaggatacatacccagagaaacacacagttcctctaagacattggtatgtttaaagaagtgtacgaatgggaatggtaagcacaggttttcttttacatacataatcccatttcctgtcaattaggtatactttaaacactgtcttatgtgaattaattcatttaatactcatgaaaatgatacaaagagggtatcgttgctggcaaatgacaaatgcagagactgaggccagatgagtaaagttacttggttgtgttgtgacagtaagtgtcccactgtggccagtcagtgtggtgtgggaatgtaccacctctcagttaggacacctcgggtagtttgttttcagtcttctgaattaaattggcttcagagaatattgcatgaagaagaaaaagaaacttgaagggaaagtgagttagttatatggaaacaaaaatcttcattggaactgaaaaacatactccaaaatagaaggaaaaatgacctttgcctctctttccttctttctttcttcatttctttctatagtaagaggaaaatgaagataaattcagaagaaagaaattaaggacaattacaagattttctcaaataaaaaaagaaacaactaaaaaagcaacacaattatatggtaagcatatattttatatttaaagaaactaccagttttatttttccttttttatttaaattagaaaaaaagcttctttcacatgtcaatcccagttccctctccctctcctcctcccctgccctcaaccaaccccctatcccatccaatttctgctccccagggagggtgaagccttccttggggatcttcaaagtctgttatatcatttggagcagggcctaggccctcccccatgtatataggctgagagagtatcctctatgtggattgggctcccaaagtccattcgtgtactaaagataaattctgatccacttccagaggtcccaaaaattgcagacctccaaactgacatcctcgttcagggtgtctggatcagtcccatgctggtttcccagatatcagtctggggtccatgagcaacccctgttcaggtcagctgtttctgtgggtttctccagcctggtcttgacccctttgctcatcattcctccctctcttcaactggattccagagttcagctcaatgtttagctgtcggtatctgcttctgcttccatcagctactggatgaaggctctaggatggcatataagctagtcatcaatctcattattggagaagggcatttaaggtagcatctccactattgcttagattgttaattgaggtcaaccttgtagatctctgaacatttctgtagggagacaccgtaaccacacctcctaagggctggctacaggtatgcctgaccatgcctgtcaaggtgtggtcaaggtgaggtcagaatgacgaggctcttaagcgaccacgagcagatggaatgccctcttccccttctgctgtcccttctctctgtcctccctgccttgctgcccctgggcacgctctggcttgcgtttggcttttatttatctgaataaaggtatcttgaatctacaggctttttccttcacatttccctagtgccagatttctctttaaccctataatgactccctctattatggtatctctcatcctgttctcctctattcttgccctgactccatcttcctgctctctcctgtcctcctatcccctcctcttctccccttctctttcttctacctccctctcccctatgcccatgctcccaattttctcaggagatcttgacccttccccttctccatgtatgtctctcttagaaaaccacccgttttcaaaagcagtcttaccatttcacattcccaccatgattccagcccactcttgatatgtcagtcttttctatattagtaattctaatggatgtgtattgcttatatttataccatgatttcattcacactgtagttttaactcacttttttttagagggcctcactatgtaaccacagatagcctggaacattctatatcgaaaattcactgagatgtaccgcctctgccactgcttcccaagtgctgcaactaaagacatgcaccaccatactcacctcatttgccctactttttaaattgggttggttgatttcctactcatgaattttaagaattatatccaggggctggagagatggctcagaggttaagagcactgactgctcttccagaggtcctgagttcaattcccagcaaccacatggtggctcacaaccatctataatgagatctggtgccctcttctggtgtgcagatatacatggaagcagaatgttgtatacataataaataaataaaatcttaaaaaaaaaagaattatagccagtccatcccaagctacttgtctaagaaaactagaagtatatttacctaaggccacacagctcatagcagctatatgtataacattcaaaaaactagaccagaaatgttcatcaaggaaatatcaaggaaatccttacatacactgtgctgtgtccacatgataaaaatgaaaaaaaaaaaaaacacagtcatgtacacaaactggggtgggggagggtggttcatgagtgaaagaagccagggaaaacaaatgggtacaaatggtgaattcaatttacagaaaattctagaaatgcaaactgatttataacaacagagcacagtgattggaagagaagagatagtgactgattacaggaagatcacaaagtctcttctgacatgctagatatgctcactgtcttaactgttgtgatcatgacatggcataaatcaaagcttaagaagtacaccacagatatgtgcaggccactgtgcaacaatgacagatcaagaaaagaattaatcataaggaagcagctaaaataatgaataaaagaactcaaaatagcattgttttcccatagccgaggagctactccgccacctaagctaattgaaagtaaagaagaaaataatgaattgctcctaaggaagaaagataaaggagaatgaagaccttaatttttttctaatttgtcatggaatgaaattcatgattaattcttgtagaattcaactcaaagggcattgtctggtaagtagaagtccttggggctattcattaattgaagtattcaatctagaaaaaatccttaggaatacaaaatgttttagttgtacaaaacagtcactgctttattacatacaaaataaaatttactctctatctctcatactacaaataacccatatctaaatattcatcatccacctctatttacttgaatacttatagcttatataaaaaaaacatttttatacatcctaaaaatatttgtgattaacagatgaaaataatttaatgcatgcttgtgtaatgccattcattcaggacatattacagtgaaaattacaataaccctgaagtggcaatccatgtgacaatggcatcttgtggccttttaattctgatactggcctctaagaatctgaacttagtaaggaaaaggtgtaacacttgttaaataatatccttaatttttccaagatgtacaagaaaggaaaatcatgattcaatggagaaatgacaccagagtaaaagaatttatatttctgggtcttactcagtcccaacacctgagcctggtcttattccttgtcttgtgttttgtgtacatcacaactcttctggggaatctcctcatcatgatcaccgtgacctttgagtcccgtctccacacacccatgtacttcctgctcagaaaccttgccatcctggacatctgcttctcctccatcacagcccctaaggttttggtggaccttctatcaaagaaaaagacaatttcctacacaaagtgcatgacacagatatttttcttccacctgcttggtggggcagacattttctctctctctgtgatggcatttgatcgttacctggccatctcaaagccccttcactatgtgaccatcatgagtagtaggtggtgcacagccctcattgcggcctcctgggtggggggatttgttcactccattgtgcaaatctccctcttgctcccactccccttctgtggacccaatgttcttgatactttctactgcgatgtcccacaggttctcaaactcgcttgcactgacacttttgtccttgagctcctgatgatctcaaacaacggcctggtaactaccctatggtttatcttcctgctggtgtcctacatggtcatcctgatgatgttgaggtctcaggcaggggaggataggaggaaagccatctccacctgcacctcccatatcactgtggtcaccctacattttgtgccctgcatctatgtctatgcccggcccttcactgccctccccacagataaagccatctcagtcaccttcacagtcatctcccctctgttgaaccccttgatctacactctgaggaaccaggagatgaagtcagccatgaggagactaaaaagaaaactcacacctcttgaaaaataatagaaaaagaaaacccactcttgccacaaagaactctttgcattgtattttctgtttttatataatcaaataactgccaattaaccaactagactttctaaggaaaccatttgattttctgattatattaatagtacttaatcagccaaatttctatatggtacaaagtaaatagtcttacaggattgggctgattaacttatttgttatttagttgattggctttgagacaaggtctctgtagccctggctgcctcccaagtgctatgattaaaagcatgagacaccagacttagtctattttctttttattaaagagttgtttgttttattattgtgtatatgggtggtttgtcgggatgtggattgtggaccatgtgcatgcatgatgcctatggaggctagaggaaggcattggatcccccagaagtagagttacacatggttgtgagctgctatgtgagtacaagaaaccaaaccagggtttcctgcaggagcaagcaagtgctcttaaccactgagccatctctccagccctaattagtatgttttcaatcaaagttacaatatgtcaaaaaaaagttacaatatgtcaaccaaaacaactatgtcattaagttcaactccttttgcaaaaggcaaagaattagaacagttggctttgcctataaccccagcacttggaaggtggagacaaaggatatggaactcaaggccagtttgaagccagcctaggctatatgagaacctatctcaaagcactaagcaataaaaaggaggagatgatctagagataaaaggctattttttcaaggccttcagtcaagttaggcacagaaacaccttttaatagctaactcattgcttttctctcacatgactgtaagttcttatgttgttgtctgctagattaaaaactatattcctgttctagacagctcgcttagggcctgaggttcacattcatgggtgtggctggcttatgaaggttgggaaatttttttctgtttagttaaacttgtagtggacttgggcttgtgagaatgttcccagatcataattattacccttctagatttgtgtcatgaatgaagcttgacaagagctctcatcatgacctaaaggtgtttatgataatacagaataagacttgccagtttggcattcttgtgatgagtttgaaaaaggagtagaccctttaggaccttacaggtatcagtccatccccaacatccaagtgacttttcagttgtgtacttactagttcaatctcaagtcgatttcactattcacatttcctgctacttgtgggatggaaaggggggaataggagagacaaggaggtcagtagggagagagaaagaagagataaaactcatacctgtctgttttttaatctgttggcattcatggaaaggccaggtagactggtgttatcatctgggaacatagtgaagccaggcagctgaaagtgctaccttcagagtcacacagacatagacaccagtcatttatctgccacctgcctggtctgagatcttgagcaattatatcttctctccaaaggtcattcattgctcacttacgtgaaagtaattataatacccatctcatagagtcttagtgttcaaaaaagattgtatttatgaaacataatggctgccacatagctaatccttatatacaggcaaatgtcactattataacaatctctatttagctacctaacaagcttcctgcacacacacacacacacacacacacacacacacacacactgacctgtcagttcccatgttcttccaccttactgaagaaacagacaaaatagaaagaattggaaaatataccaaattcaaaaatctatatcatctttaaatgcccagctctctatcattaaaacatgacaataggcttgcttgtcatttatgaatctcaaagagacaccctaatgggttgtagagatggctctgttattaagaacccttgttgctcttgcaaaagatccaagttcagttcccagcatacacatggtggctcacaaccatctgcaattctaggcccaagagatctccatgggcaacaaacatgcatgtggtacatatatatatgtgggcaaatgaaaaatgaatgaaatatatatttatatttttatgtatacatgagaagtaaaataaatgcatctttaaaaagagataccctaaagctgatgaacaatacatcacaggaaaatgctataacttttaaaagctatgaatacagataaaccctcaggactggggaaggctcaataggtaaaccacttaccttgcaagtgaggggatttgtcatagcagatctgggtagacagagagaggaagatctttggggatcactggctagccagtctggcctaattggtgatctccagaccagtaagaagcctgccttaaaggaggtgggtgagttcctgggaatgtcacctgagagcacataaaagagaaccaagccccagaaaagtcctccaaagcatggagaatgtggaaaacaaacttgatatgtctccccaccggatttctctttggcccataaatatttaccacgcttggtaatgagcctcaactgtctgctggtcttcgtcacctgttagacccccatgtaaatttttacactattaacatccttaagcatgtgtcccgacctgcaggacatcaacctgggacaaagagtcagggatagggaatggggacaagagacacagaaagaacaaccacaagacaggattctgatcaagtggcaaactttacttttctcaggctagcttatatagtcaggatgtggggaggggcagaatgggttgtttgtgcaccaggtgttagtgtaggcaggctattaggaagccacaaagaggatgtatgacagggtaaagagttcatgaataagaggtccaggaagggttgcctaggtgactgagcctgtgggtggaggactgggtcaagttgtttcttttcttgagctgaggttctaaggagctgctatgtaaacgttaactatgtggcctgccaagcatggcctaggatctcatgccaagccctgagatttggctcccaacaagcatggaaattctaggaacaagtcacacttgccaaatcattgatcttagggtcctgttcccttatcctagtacatttggtctctagaatagtcctggctggactggaactcatagaccaagctggttttgaacttagagagctccatatacctctgcctcccaagtgctagtattaacatgtgtgccccacatctggcccccagacttttctttatgaaattgcctaagaaaaatgcacaccatacaaccctgactgcccatttgacaccaatgtgtcctttattccccctatctatctcttgcagttcattcaaatcatgtctttatctctgttaggatctgacagcacaaaaatctaaacatctgagtccttatatctcagactatagttccaagaagtcaggaaccctgaaagcttgcctaatgtttatctctggtgacttcaatgaaccatgtctaagcacacaacttgagttagagtcctgggaaatagtcatttcatctggtagtgcaaacagttattggtataatataaatatcaagttgaactgcattatttttttcatttaaactaaaggtgtgtttttacctgttccattgaaatatatccatcaaataaaattattcatattctcagtatacaatgtgaagtatattacagtgatttatagagactttggtctctatgctccctcattcaagtgttgtaatgatcaatgcctctgagtgcccataacaaagaaatatatatttatttgtgaaataagtaacttgtcacctagattctgagtgacttgtgaatctcatcgatgtcaattaaaatagctgctgcacaaaaatcgtgcacatactgctttaaaaaagaaactgagcagataaatctccataatccagctcagagaaccacagccacagagctcctgtttttttcccactgacactttccgtttaattccgtttcccagctgatttcagacaaagtaacttttaaccaagtgggagaccacagtccttgctggcttgttgcaacgttttcttcctgatgcaaagaaaattgtctcttgggctaaaggtcatgtcccaaaggagcactaacatgccatactgtgtgtgtgtgtgtgtgtgtgtgtgtgtgtgtgtgtgtgtgtgtgtgtctgtgtgtgtgtgtgtgtgtgtgtgtgtaggaggaagggggaactgctgacattttagtgatcccatggcagtattggtcacactgcatacacattgatccccaggaatattccctttgctgtttcctatgactttgtgactgaggaactagagcgggtagcctagacactgcaaagcagaagagtgagaaccttatgattcccagaggttgctcaccaacccatgcgattccccagccccgaaacacactctcttattccgccaactcccacacccacatcccccaatctaaaagagggttagatcagtaggcttgagacaggcaagctttgtgttacatgtagaatttccagtaaacatacttctaagattcaatttggagcattgtaaatattataagatcaatttcccacttggcagttaaatcaacaatgaatttccaaaaccagtatctgtttatgttgacttcaaaaatgctacaattgtatagaatgatccaaacaaagcaacactcttaaagaaacaaagagaattcagttcagtgtatagctatggatgtctgctggagaaatgaagaccaagggggtcgggaccaggctggtgaatcccacagaaacagctgacctgaacaagggggagcgcatgaccccaagtctgctgtctgggaggtcatcacgggactgatccagacccttgaaagtggttgtcaacgaggaggcctcggcatcctatggggcctctggtagtggatcagtatttttccctggtgtaagaagggactttgagagcccatcccacgtgaagggatgctctctcggcctggacacatgggggagggcctaggcctggtccaggatgatgtggaatttggggagcccccctggagggccctaaactctatggtgagccgagggggaagggggctgacggggagggctgtgggggaagagggagaagggattgacataggaaattataattttgtaaaaatgaaaataatttaaaaaaaaaagaaacaaagagaagtagtagtttctcacttggggcagatggaaagtgtagtttatacagcacagaatacaggtagcagggacaggagagctgtaccacatctctctctgtgggactttgaggcaagagcttctgagcttcatatgtggattctaatagcttcttaaccaggaatggagtttagaagccttgagcaagaagttttttactgtattggggatcaaattcaagcccttgaacatgctagtcaagaactttaccactgagtcacgtcctcagtccacacaaggtattttagcgagtcagttatctgtgtgagcatttgccgccaatgacgattaaagctcctgaagcttttgggttcaatgaagagcaaggtaattgtgcaatagtgaagcagcacagttggtaaagcatttgccaccaagcctgacaacctgagtgcaatcccatagacccacaggatggaaggctacaactgacttctgcatcctctgacctccacatatgagctgaggcacataaggacataagcaaatacacataataaacaaacaaataaataaatgtaagttttcaaaagtaaaatacaagagaaaaacctcaacataaagggcattttagagcatgaagtcacagtagacagacacactttgctcaatgggatgctggggcagaggggagctcttaatttgcaggttcatgtccataatgtttgctgggatttttttccaatgcatgttctgctgtgggtcaccgggtggttttaatatagtttcaagagccctgttttggaagaattaggatattataggtctttacccactcttgtcttagttatagttactattactgggatgaaacaccagtaccaaaagcaacttggggaggaaaggttttatttagcttatgcttgcacatcacatttatcactgaaggaagtcaggacaagatctcaaaaacagggcaggagctggtgtagaggccatggaggagtgttgtttactggcttgttcctcatgtcttgttcagcctactttcttatagaacccaggaccagcagtctggggtgactccaccctcaattgtctgggccctcccccagcaatcaccaattttaaaaataccctacaggcttgcacacagcctggtcctatgaaagccctttgtcatctgaggctcccttctctctgatgagtctggcttgtgtcaagttgactagccagcccagttcccttgccccctttccattttgcctgtctttcaatgcaatgtgcaaaatcctatactttgagaatatcttacccaaagttaaaagctatcttttacatcccttactagatcaatcgtttggggggaaaaaaagagcttatgattaaagcagagtccttggaacccttttctgtgctttgccattggaatagcatgtggctgctgctggttaattgtaaagaaggcagtacagactacagagtctgaattttgacactgtcgtccctacccaggctgctttcacatataacatcctttcctgctaagtcactcccagccttgcctctcaccatgtgcaggcttccagcaccaaggtctcacacggcatactactttgatttgatgtgcaaataatcttcctgagcctttcttttacagcagtttcaggaggcagggaatagttaacgctcagaagagttctgattgtggttacgaacatttagctttgaaataagaccaatcttaagtggagataagctcctgaaggctttgagacatgggtcaacttcccatgactgctttctaaactataaaacctggatgaaaacatcaaggtatgaatgactcaggctttggaagagataaggtggcacaacataggagaatcactccagtggctagggaaatggatcagcagtttacagcacttgttgcttttgctaagaatccaggtttgattcgagcacccatagaggctcacaaccatccccaactacagtttcaggagatcttggagacccctggaggaggcacctgtgtagtgcacatacatacacacaaaacactcatacatataaataattctaggtgaattttgtcataaatgttcactaaaagaaagcaaaaactaacaaaacagaactcttccagtgggtgtgtactctaatattttggggtatttaccttgacttgatctctgagcataaaaaaatagggggaagagaaaaaatggctgggtggggtggctcacacctttaaagtcctagaccagcctgatctacgaaatgagatcaagacaaaaagaaagaaagaaagaaagaaagaaagaaagaaagaaagaaagaaagaaagaaagaaaagtattacagaggaaatactgaaatgtttactaatttttttgtaagacaaggtctcactgtttactcctggctggtttggaactcacagagatccccctaactctgccgcccaagtgttatatgtttattaacttcaacattttcctagaggagaatccacttacatagagaaaaaatgcacttacatgcacagttcagtaaatttttacacaaattgaaaatgcctttgtaccaagcaccaggttactaagatgcaacattatcaacaccttggggttcctccttcgagctccgttcatttgtatctactttaataaaacaaaagaatgtttattctttggataggctacttaggaaaacactatctgagaatacagattacaaataatgggagtcagtcttgctgctgtaaatagtgtgtaaattggaaactatcaatgggggaatgtgtcctttcatggtctgaggaggttgtcaagagagctgctatgaacacttctgcagatatctcttggtagacataaaatacaaagaaatagatccctactgaatatagcaccgaaagatatacaccatatgtatgtttatatgaagtcaggcatataatgaagcagtaaagtggctatatcaatctcacagacacttgcattgtataaagtttccagtaatcagtaatcccaaaccaccaccttcccttgatatttttcatttgctttataattgttatttttataatttccttcatctttttcattctagtctttctggtgtgtgtgtgtgtgtgtgtgtgtgtgtgtgtgtgtgtgtggtttgctgtagtaatttgaatctatgatgtcatgctaatgagttgaactgggatttggacaccctatcttgtaaagagttcttgtctcccacattgcattgagttagtaacaagcttaatgactgagtcaaaattctgggtgatttttcagataatagttgcatcctaaattacaatcacagagtatatgttttaaaaaagaatttttgccagggataccggcacacacctttaaaccaagcactcaggagacagaggcaggctcatatctacctttataagttcaagttcagcctcctgggtctacaaagcaaattccaggtcaaccagggctacacagagaaaagaacccctgcaatgaagaagaattacttctcctcctgaagtccaacccaacatgcaactgaaaagacaacactagaatctagaccattttatatactcaatatattgttactcttccagagatgcacttgaaaagggatacctgacatgatggatcaggaaattataccacagtgaagaaatgtatcatcctggagattgctcaaccccaagagctgagctagatattatctgccctgattctggtgtgagtgacaactatcacaggaaacctcagcaccatcatcatgagcctctcacattcccatcagcttcctgctccacagtctgctcgtgacatctgctttccttcatcacacttcctgatcagtgtgtcagggaaaaagcatcttctaaaatggcttcacccagctgctcttcctttctctccagcttcctcaaaagaagccttactagaggtgtactttcatgagctactctcctagtccacctctatcaaattgcccttctgtttatttgcttatatattctttgatcatctctcctgatacctaaagagctcacaagttctaaaagaaaaagtgattaattcttgcaatatagggaagaaatctgaacacaatgtaatcgggaagatttatgaaggaagaaggagtggaggtgatggtagtgccagcaccacacagggaagtgtcctgttcttggtcttgaagatctttaccagtcttgggagacttaagttgggcatgagcaatctgtccagtgagagacactgtctcaaaaaattaagtggagaacaatcaagagaagacatccaactgccacctccggcctccacacccattagcatgggcacatgcgctgacatacacaggcatatccactggaacacattgataccacacacacacacacacacacacacacacacacacacacacacaggagaaatagaaataaataaataatagttaacatggaaacttaagaacaaagaaaaatgtgttttctgatctctatggtaactctgagtatgtaatggatcaacaagaaaagacagatgtgatgaaatagccatataaggaattgtgatcatttttttttctaagttcctacctcttacacacagagagttgctggctccctctgagcctattaagcaaagatacctgggctctgggtacaggatctgtgaggattcatcccctcccctgcctatgtcaggagattctcaaagccaaactgtttgtttgcacacatcttctggtgtaccgcatgtaatagctcccaacagaattttctccctaaaggaaaagtctggccactgaacttcaataatcttgcccaacagtattaccattttgctgattattctattgtggctgaggctgagcgagtggactcagggcaaacatgctatggaaaagcatggtaaagtcatacagaagagagtctcagagcttttaagatagaaggtacaggggctggcgagatggacaagaggttgagaacactggcttcgcttccagaggtcctgtgttcaattcccagcaatcacatggtggctcacaaccatctgtaatgatatctggggccctcttctggcatgcagacatgcatgcaggcagaatgctgtgtacataataaataaataaatctttaaagagagagagagaaggtactaaccctaagatgccagccttccttaaggaaaagaaagccttgacaaattaccaacatctaaggtcagtttatacaatcaaatagtcatgtcgacttcttgggtgggaattagagtttgggggtctttaatgagatggcagtaggaagtcagaccttgaggagtatatttgtatgtctgggtacatgtgtccatggataaccaactttgaaatattactatgcattaactaagaaaggtttgtatgtcagtgatgctttcaagtaggtgtggggttattaatgttaaacgccagaacagtacagagaggaagaacttactcaagatagagaaggcacttgaaggacgcaggaaagttcaacatgttagaagatgtggatgatggacttgggggttttcctcaacttgggaactgtagcattcaaaagcctatttcatcaaagtgtattctctcagacatattggtaacagagtacttgggagctgagtttttcttgacaaaaacaaacaaaggcaaacctcttacatctggtttctttattaggctccaatgtgctacatatttccccagaagttctgattaatactcctggtcttcatttcttggtttctgtcattgaacataaaagtctatcagctccagttgggggtggggaggctatcagctagattcttgcccattgagttggccatttggtcactttcaaggctgatttctttacagaacctcaggctgttggtcctgttatattttttaagacagaaagcaaagagcatgcttttaattcatcccctagttctcttccatgtgcagttattcagctacacataccccaccactcaagttttatctacttcccaattcactgatcttccttccataggtggggcccaaggtacaacacaggcttctcatctgcaatccttcctgcttcaattcaaccacctgatctggcccaaacacccagcacaggctgcagtgagggagggttcccttctcaagactccccatccaacacaaaaggaattccagataatccaaatccacaggatggttaactttggggagtggggagggggaaccaaaggcttctcttcttctcacctccatttcctcatctgcagcacagtatccaggcttggtctatgctccctctcttgcctttgggtggccctggctgtcaatgggagcttacaagttcctcagccctgtaagatgctctgggtgtgaccttgaggctagtctcagaactggccttatatcttttttgctcatattatttctatatcgatctcttcagtaactgctttgtaagcctggccaagtgaagaatagaagacataataggaatcataaaatagggtggttttcttaagcataactgtgtgttggtttagatagtgcataataaatgcatctagagagctagagaggggctgggagcttagctcagtggtggagggcttgcccagcatgcagaaaccctgagagcaagctgtgatgcagggggaggagtctctgtgtcacacttaatccttaacccaccactattgaaaggacaaaacagtgggcaattggtaattgttagataaccaatcaatggggatatgtacatggatatacaacatgtaaatccccctcagtactaatttataagcgattcatttgtcatcaacttgagaatatttttcttcaactaaactttattgccacaatacagcatctgttcaccagttcactgtgaaaagtttctaatcccgaaaagcctctccaccgatgcagccatccaagtcagaccaaatcaaacagaattagaaaaagcccacatttaatggttgcaacgttcccaggtggccttccagtcccccaaaaagaagatgggaaagaaggatgggaaaaccacaagtctattttcttggggctctttaaataccctgggagtggtctagagcatctctgaaggaaggggtcatcatttggtgggctttctgagatgcagcaaagtttggagggagataggaatgtttctacacaaaagtaagcctctccaccagtgcatcaatccaaatcagaccaaatcaaacagaattagaaaaagtcaacatttaatggccacaatgctctcgggtgaccttcctgcccttagagaggaaactggaaagagacaccagaaaatcgaaaatctattttctgggggacagtttaaacaccctgtgggagtagtcttgagcatatctgggagtggggatcagaggtcatgatttggcaggttttctgagatgcagcagggtttggagggaaacagtggagggggggttgggtgtaccttcgaccagagcatcacagactttgggtatatggatgccaggagctgggatgaagcttccatcataacacactgcctctggggaagacatatttaggggcaataaggaaaggcttacaaagatttagtcctgtgctccacttctgcccttccacaggcatgccacccaactatgcccacccccccattgcagaccccaacccatcatatatccctcccccagacttcactcagccaaggcagaaggagtgaccctccacatagctccatatgcccttgacaggtgtcctggggattctatcttactccaaaaggtttattgagacagttatttttttttccacatataggttggggacaaaagggatggggcttataaataggaacctgaagtgggaaccatgggcaccaggtagaacccaaataaagagtgaaataggggcaaaagtgtggagctgggaaggactgacagactgtcacacagtgataatgtgggctgggcaccattaaaatcccattcatttatacagataaacagagagctagggtcccagggcccactctactctctccatctcaaagagggcctatgggtgggagagtgccccagaggagtggagaccctcccaagaaggcctggcccctgaggcttggttagtgttggaaagcaagaggaagggactgaggtccaagaggacaacctggggcccacagaacagggccacaggagacccctcagctttgagaatttttataaacaataacctcatcctataaataaatcctaccatatataagtttatgcaacatgtttctttcaactaatgtgtcatgaacactttctctaccctcatatagaagagcctggatcttttcaataacctcttttgtgtgtttatggaagggtatttttaaaagatgtatttatttattatatatagtgttccacctgcatgtatgcctgcagggcagaaaaaggcacctaatctcatttaaaaatggttgtgagctgacatatgattgcttggaattaaactcaggacctctggagaaatagccagtgctcttaacttctgagccaatcctccagctctgtcaaatacataattctaagcaaaaaatatttttttgatttttcaaaacaggatttctcagtattgctttgaaggttgtcctggaactcactcctggaactgtagacctgcctccagagtgctgggattaaaggtgtgcaccaccaacaccgggcacaaaattattatgtcataaatgttcactaaagatggcaaagaaaaattaacaaagcagaattcttccagtggatatataatctgattttttttggtatttaccttagcttgataccgaacataaaagctggagcggggggagggggggctgagctgtgggtcagcctagtctgtaaaatgagttcagggatttaaaaaaaaaaaaaaggtactgagggttgcctgatggcagtgcacacctttaatcccagaataggaggcagaggcaggtgcttctcaagttccaggacagtcagagctaaacaataaatatattacagaggaaaggtctcactatttacgcatggctggtttggaactcacagagatccccctaactctgcctcccaagtgttacatgtttataacttcagcattttcctaaaagagaatccactaacatagagaaaaatgcacttacatgcacagttcagtaaatttttacacaaattgaaaatgcctttgtatcaagcaccaggttactaagatgcaacattatcagcacctcaagatcctccttcaagctcccttcaattgaatctacattaataaaacaaaagaatgtttattcttgggctggagagatggttcagagcttaagagcactgactggtcttccagaggtcctgagttcaattcccagcaaccacatggtggctcacaaccgtccattatgagatctggtaccctcttctggtgtgcagatatacatggaagcagaatgttgtatacataataaataaataaaatcttctaaaaaaaagaatgtttattctttggataggctacttaggaaaacactatctgagaatacagattacaaataatgggagtcagtcttgctgctgtaaatagtgtgtaaattggaaactatcaatgggggaatgtgtcctttcatggtctgaggaggttgtcaagagagctgctatgaacacttctgcagatatctcttggtagacataaaatacaaagaaatagatccctactgaatatagcaccgaaagatatacaccatatgtatgtttatatgaagtcaggcatataatgaagcagtaaagtggctatatcaatctcacagacacttgcattgtataaagtttccagtaatcagtaatcccaaaccaccaccttcccttgatatttttcatttgctttataattgttatttttataatttccttcatctttttcattctagtctttctggtgtgtgtgtgtgtgtgtgtgtgtgtgtgtgtgtgtgtgtttaatgatttgctgttgtaatttgaatctatgatgccatgctaatgaagttgaactgggatttggacaccctgtcttgtaaagagttcttttttaaggggagggatttccaggcagggtttctctgtgtagctctggaggctgtcctgaactagctcttggagaccaggctggtctcaaactcacagagatgcagctgcctctgcctcctgagtgctgggattaaaggcgtgcgccaccaacgcccagctgtaaagagttcttgtcccttacattacatctagttagtgacagaatctacctgcttgatgactgagtcaaaattctgggtgatttttcagataatagttgcatcctaagtttcaatcacagagcatacattcaaaaaaaaagaatttttgccaaggataccggcacacaccttgaatttgagcactcagaagacagaggcaggctcatatctacctttataagttcaagttcagcctcctgggtctacaaagcaaattccaggtcaaccaggactacacagagaaaagaatccctgcaatgaagaagaattacttctcctcctgaagtccaacccaacatgcaactgaaaagacaacactagaatctagaccattttatatactcaatatattgttactcttccagagatgcacttgaaaagggatacctgacatgatggatcaggaaattataccacagtgaagaaatgtatcatcctggagattgctcaaccccaagagctgagctagatattatctgccctgattctggtgtgagtgacaactatcacaggaaacctcagcaccatcatcatgagcctctcacattcccatcagcttcctgctccacagtctgctcgtgacatctgctttccttcatcacacttcctgatcagtgtgtcagggaaaaagcatcttctaaaatggcttcacccagctgctcttcctttctctccagcttcctcaaaagaagccttactagaggtgtactttcatgagctactctcctagtccacctctatcaaattgcccttctgtttatttgcttatatattctttgatcatctctcctgatacctaaagagctcacaagttctaaaagaaaaagtgattaattcttgcaatatagggaagaaatctgaacacaatgtaatcgggaagatttatgaaggaagaaggagtggaggtgatggtagtgccagcaccacacagggaagtgtcctgttcttggtcttgaagatctttaccagtctcgggagacttaagttgggcatgagcaatctgtccagtgagagacactgtctcaaaaaattaagtggagaacaatcaagagaagacatccaactgccacctcagcaatctgtccagtgagagacactgtctcaaaaaattaagtggagaacaatcaagagaagacatccaactgccacctccggcctccacacccattagcatgggcacatgcgctgacatacacaggcatatccactggaacacattgataccactcacacacacacacacacacacacacacacacacacacacaggagaaatagaaataaataaataatagttaacatggaaacttaagaacaaagaaaaatgtgttttctgatctctatggtaactctgagtatgtaatggatcaacaagaaaaaacagatatgatgaaatagccatataaggaattgtgatcatttttttttctaagttcctacctcttacacacagagagttgctggctccctctgagcctattaagcaaagatacctgggctctgggtacaggatctgtgaggattcatcccctcccctgcctatgtcaggagattctcaaagccaaactgtttgtttgcacacatcttctggtgtaccgcatataatagctcccaacagaattttctccctaaaggaaaagtctggccactgaacttcaataatcttgcccaacagtattaccatctttgctgattattctattgtgcctgaggctgaaggaatggcactcagggcaagcatgctatggagaagcatggtaaagtcacacagaagagagtctcagagcttttaagagagaaggttctaaccctcagatgctagccttccttaaggaaaagaaagccttgacaaattaccaacatctaaggtcagtttatacaatcaaatagtcatgtcgacttcttgggtgggaattagagtttgggggtctttaatgagatggcagaggaagtcagaccttgaggagtatatttgtatgtctgggtacatgtgtccatggataaccaactttgaaatattactatgcattaactaagaaaggtttgtatgtcagtgatgctttcagtaggtgtggggttattaatgttaaacgccagaacagtacagagaggaagaacttactcaagatagagaaggcacttgaaggacgcaggaaagttcaacatgttagaagatgtggatgatggacttgggggttttcctcaacttgggaactgtagcattcaaaagcctatttcatcaaagtgtattctctcagacatattggtaacagagtacttgggagctgagtttttcttgccaaaaacaaaggcaaacctcttacatctggtttctttattaggctccaaaatggtacatacatcccaggcattttgattaatactcctggtcttcatttcttggtttctattattgaacataaaagtctatcagctccagttggggaggctatcagctagattcttgcccattgagttggccatttggtcactttcaaggctgatttctttacagaacctcaggctgttggtcctgttatattttttaagacagaaagcaaagagcatgcttttaattcatcccctagttctcttccatgtgcagttattcagctacacataccccaccactcaaattttatctacttcccaattcactgatcttccttccataggtggggcccaaggtacaacacaggcttctcatctgcaatccttcctgcttcaattcaaccacctgatctggcccaaacacccagcacaggctgcagtgagggagggttcccttctcaagactccccatccaacacaaaaggaattccagataatccaaatccacaggatggttaactttggggagtggggagggggaaccaaaggcttctcttcttctcacctccatttcctcatctgcagcacagtatccaggcttggtctatgctccctctcttgcctttgggtggccctggctgtcaatgggagcttacaagttcctcagccctgtaagatgctctgggtgtgaccttgaggctagtctcagaactggccttatatcttttttgctcatattatttctatatcgatctcttcagtaactgctttgtaagcctggccaagtgaagaatagaagacataataggaatcataaaatagggtggttttcttaagcataactgtatggtggtttagatagtgcataataaatgcatctagagagctagagaggggctgggagcttagctcagtggtggagggcttgcccagcatgcagaagccctgagagcaagctgtgatgcaggggggaggagtctctgtgtcacacttaatcctaacccatcactattgaaagaacaaaacagtgggcaattggtaattgttagataaccaaatgatggggatatgtacttttttttttttttttggttttttgagacatggtttctctgtgtagctttggagcctgtcctgacactcgctctggagaccaggctggcctcaaactcacagggatcctcctgcctctgtctcctgagtgctgggattcaaggtgtgagccaccaacgcttggcaatatgtaccaatttataagagatccttttatcatcagcttgagaattcttttttcttcaactaaattttttattgccacaacacagcacctgttcgccagttcactgcccctagggaagacatgtttagggacaataaggaagggcttacaaagattcagacctgtgctccacttctgtcctttcactggcatgccactcaactccacccctgccccattctatctcagaaccccaacccatcacatacccctctcctcaagctccactcagccaaggcagaaggagtgaccctccacatagctccatatgcccttgacaggtgtcctggggattctatcttactccaaaaggtttattgagacagttattttttttccacatacaggttggggacaaaagggatggggctataaataggaacctgaagtgggaaccatgggcaccaggtagaacccaaataaagagtgaaataggggcaaaagtgtggagctgggaaggactgacagactgtcacacagtgataatgtgggctgggcaccattaaaatcccattcatttatacagataaacagagagctagggtcccagggcccactctactctctccatctcaaagagggcctatgggtgggagagtgccccagaggagtggagaccctccccaggaaggcctagcccctaagttcggttagtgttggaaagcaagaggaagggactgaggtccaagaggacaacctggggcccaaagaacagggccacaggagacccctcagctttgagaatttttataaacaataacctcatcctataaataaatcctaccatatgtaattttatgcaacctgtttctttcaactaatgtgtcatgaacactttttctgccctcatatatagaacatatagaacagcctgaatttttttcaataacctcatgatacctggtaaatagatttttcccaatgatgttttagcagtaccctgtagttggacattttctattgccattatcatattatatacaagagtgagataaacacacatgtaaatgttattttttttttttttttcttttcttttttattaaattattaatattttcacatatactttccctctcctctcgcctccccctccgccattctttctcccacctccaacctaccccccaccccatccacccaccattccccaggcagggtagggcccccaaccggggctccaccaagtccaccaaatcttcctgtgctgggcctaggtccctccccatgtgttcagagacagagtgcatctcttcaagtggaatgggctctcgaagtcccacccaccagggcaaaacgccagtccacctccctctggagtcattcatgatttctagtttccttggggtagaggattataggctggtaaacctttgctctatgtctaaaaatcccaggagtgcaggggcctccccattggcatccatgatcagggggctggattagtcctgtactgtcctctcaaagagcatctggggtcgatatgctttccctttttcaggccaactgtttctgtgggtttctccaaccaggtacagaccccttcgttctttattcctccctctcttcaactgagttccagatttcagctcagtgtatttctgtggatgtctgtctctgctctcatcagccactggatgaggactctagaatagcatagagagtattcatcaatctcattctaggggaagggtttctaggccaacttctcctccactgcccagattgtcagatcgtgtcatccttataggtctctgaagatctacctagttccagatctcttctcggacctatagtgactccctctgatatggtatctctcatcctgctctctctcctctattcttcccccaactcaatatatctgctcttccatttcttctcctctactcttcatcttgtgctctattgtggcaagcacccactttcccgacctcatgctctcattagctcgggagttcatgcatttccatttcctggtccatttatccttaagatgtcattcatgattttgttcctgggtagaggatgatatggctggtaaaccttgcctagtctaaaatccacatatgagtgagtacatactatgtttgtcttttgtgattgggttacctctcacagaatggtttcttctagttctatccattttcctgcaaatttcaagattccattgctttttccgctgagtagtaatctattgtgtaaatgtacgacatttctcttttcattcttcagttgaggggcatctaggttgcttccaggttctggctattacaaacaatgctgctatgaacatgattgaacatatgtccttgttgtctggacatgcagtatttgggtatatacccaagagaggactggctggatcttgagtagattgattcccattttcctgaacaaccgccatactgatttccaaagtggtcttacaagttcacactcccaccagcaacggaggagtgttcttcttctccgcattctctccagcataggttgtcattggtatttttgattttagccattctgacaggtgtgaggtggtatctcagagttgttttgagttgcatttctctgatggccaatgattttgagcactttcttaagtgtctttcagccttttcagattcctctgttgaaaaatctctgtttagttctgcaccccactttttaatttcattgtatggtgttttggtggctagcttcttgagctccttgtatattttggaaatgagacctctgtcagatgtggggctggtgaagattttttcccattctgttggtggtcgttttgtcttactgactgtgtcctttgccttacagaagcttctcagtttcaagaggtcccatttattaattgcagacctcagtgtctgtgcttctggcgtgatgttcaggaatcgttctcctgtgccaatttgttcaagggttgttcccactttctcttctaaaagattcagtgtggctgggtttatggagagatctttgatccatttgcacttaagtttcgtgcatggtgacaagtatggatctatctgcaattttctgcatgttcgaatccaattgtgccagcaccatttgttgaagatgctatcttttttccattgtatggatttagcacctttgtcaaaaataaggtgttcgtaggtgcgtgggttaatatctgggtcttcaattcgattccattggtctatctgtctattcttgtgccaataccaagctgttttcagaactatggctctatagtagaccttgaagtcagggatggtgatgcctccagaggatcttttattgtaaagagttgttttggctatcctaggttttttatttttccatataaagttgagtattgttctttcaatgtctgtgaaaaactgtgttgggattttgatggggattgcattaaatctgtagattgcttttggtagaattgccatttttactatgttaattctgcctatccaagagcacgggagatctttccactttctggtatcttctttaatttctttctttaaagtctcaaagttcttattgtacaggtctttcacttttttggttagtgttacccccagatatttaatgttgcttgtggatattgtgaaaggtgatgtttccatgatttctttctcattgagtttatcatctgtatacagtagggctacagatttatttaagttaattttgtatcctgctaccttgctgaaggtgtttatcagctgtaggagtttcctggtagagtttttcgggtcacttatgtagactatcatgtcatctgcaaatagtgaaagtttgacttcgtcctttccaatttgtatccctttgatatcctgatcttgtcttattgctctagctagaacttcaagaacaatattgaagagatatggagagagtggacatccttgtcttgttcctgattttagaggaaatgctttgagtttctctccatttagtttgatgttggctattggtttggtgtatatcgcttttatcatgtttagatatgttcctgttattcctgttctctccaagatctttatcatgaagggatgttggattttgtcaaaggccttttcagcatctagtgagatgatcatgtggtttttctttttcagtttgtttatatggtggattacattgatggtttttcgtatattgaaccatccttgcatccctgggatgaagcccacttgatcgtggtggatgatttttctgatatgttcttggattcgattagccaatattttattgagtattttagcatcaatgttcatgagagatattggtctgtagttctctttcttattcttatctttgtgtggcttgggtatcaaagtgattgtagcctcatagaaggagtttggcaatatcccatctgcttctattgtgcggaacagtttgaggagtattggtatcagctcttgtttgaatttctggtagaattctgcagtgaagccatctggtcctgggcttttttggttgggaggcttttgatgactgcttctatttcattaggggttatgggtcgatttaaattgtttatctgatcttgatttaattttggtaagtgatatttatccaggaaactgtccatttccattagattttcgaattttgtggagtacagattttcaaagtatgacctaaagattctctggatttccagtgtccgttgttatatcccccttttcgtttctgattttgttaattagcatgctctctctctgccttttggttagtttggctagaggtttgtctatcttgttgatcttctcaaagaaccaactctttgtttcattgattctatgtaatgttttcctagtttctactttattgatttcagctctcaggttgattatttcctggtgtctactcctccttggtgagttgcttctttttgctctagtgttttcagttgttctgtcagttctctaatgtgactttttctagtttcttcatgtgggcacttagtgctatgaacttccctcttaggactgctttcagagtgtcccataagtttgggtatgttgtgtctgcattttcattagaatctaggaagtctttaatttgtttttttatttcttcctcaacccaggaatggtgcaattgggtgttattcattttccaaaagtttgcagttttcctgccatttgtattgttgctgaattctagctttaatgcatggtggtctgataagatacagggggttatttcaattcttttgtaactatggaggtttgctttgttgcctactatgtggtcaattttagagaaggtgccatgtggtgctgagaagaaggtatattcttttgagttttgatggaatgctctatagatatccgttaaccccagttgggtcataacttctttcagatcctttgtttctttgttaagtttctgtctggtggttctgtctagtggtgtaaggggggtgttgaagtctcctactataagtgtgtgtggttttatgtgtggtttgagctttagtaatgtttctttcacaaatgtgggggccttcgtatttggggcatagatgttcaggattgagatttcatcttgatggacttttactgtgatgagtatgaaatgcccttgttcatctcttttgattgattttagtttaaagtccattttgttagatattaggattgctacacctgcttgtttcttgaggccatttgattggaaaatcttttcccatccttttactctgaggtatcgtctgtctttgaagttgaggtatgtttctggtaaacagcagaaggatggattctgtcttcgtatcaattctgttagcctatatctttttatgggtaagttaagaccattgatatttagggatattaatgtccattattcgttggttcttgtttggttgggatttattgttggtggtgtcattgtgtgtggattttgctctcctgcttctttttgtgtttggcaatattagattatctattgcctgtgtttttgtgcatgtagttatgttccttgagttggagttttccttccagaaccttctgtagagctggatttgtggatatgtattgtttaaatctgtttttgtcatggaaaatcttgttttctccatctatagtgattgaaagttttgctgggtacagtagtctgggttgacatccatgctcccttagtgtagtgtgatacactacaagcactaagggagcatggatgtcaacccagactactgtacccagtaaatgttatttttttaaattctatttgttctcactgtctgtctctgggcaccaagaattagaatatttaaggtcagaaacaggaagttagttcttatgacaggaaattagtgggcctgaaacccctgggcctgaggaatgttcccaggaggatttcagagtctcagatattcccctcactgaatatggctgctcctgaagcccagataaggacagtaagagacaagactgtaattcaatgctaatagtctctgaccttacaaagacctgaagttaaagagtgagcccagagcaagaacccctagtctagagacacacactcatgaacagaacacatagcccacccctatttaactattcttttttgtttatttaattatgcatgtcatgttttggttgcctctcctcataccaacacttctgtgacatctgcaatgcttcatgacaattattctatcaatatgtctagacaatattgaagcgatagatggactcagcactaggagatgtttatgtctgaattcagtccacagtaatgatcagagacaacatctactgaaaaacattcaatacaatgaattatcatacttaacagcccttaattttatttttagttcctctaccttcagatagagagatgtagaaattctgagtgactgagaaatgattaaacatctagaaatcagctcatggtttcgtaggtttcattcagttcattatcacatgacccagtgagtctttgcctataatttcacagtgggaacacacagcagagaggcagctcacctcagggcaaccaggaagcagcaagagggaggcttgggccagggtcccaataaccactcagctctacctactgaaggctccattaccaagaaagtagccactgcacttgtaaagacctttcttctgcagctataaactgtttctggaaactctttaacacagcaagggcttttgttgttgtttgtttttcattttttttcctaacaccaatcagccccaagttaggagtcaggaaaatcctggccagttgagtttatgaccaattaagggctaagtgctgttaagtcatgggcagtataatacagccttgccttctcacctggtaattgaagacaacactattgaaaacagtttaatattaaagtcccaaaggctagaagggctagggcaagtttatctaatgtggttatgggctataaagaccttacatccttgtggtcaccactgctctaattccactaacgagagactaagcctccggagttcatatgcacttaaacattgcaccatttctccacaatccccgaggtaggcatcaaagctcatgtctctcaagctgttgtcctttctctcttccatattattctcatgaccttcttatgcattaaggcttatgcatttattggctgcatatgatccagttttcaataagtcttgtaaagtatttaccctgaaaaaaaatacctgattattttatacactaaaatgtttatgagcaacaaaattttctgatttattgatatattagcaaataattaggtacgaaactagagattagatttgtgtggtctcagcctcaaaggagactaaagcaggaaaactaacaaaatagttcggtgctgatggaaagaagtccaggaaaatccagaatgttcagtggttaaagaagggtcagaggtcagcctcaagaaggacagactatggagcagagggagtatcaaggcacatgaacactaaaggtaaccaaacccagggccagcaaggtgactctgagttaatgcacttaccacgaaacttgataatctgaattcaacacccaggacccacatggtggaagagaattgacaccccataggttgtcctctgaccagcagcagtgttctatggcatgcaaccatacacacacacacacacacacacacacacacacacacacacacacacgaagtaaatgtaattttttagaacaaaataacacccaaaacacagtccactttttttgtttttgatgatgttcttttccataacaaaattatttcctctccaggtgacaaaagaaggagaagaaacatgagccaatggaacagagcaattacagcagggtgaaagaatttgtttttgaaggactgacccagtcccaagagctgagtttggtcttgtttcttttcttgttcttggtatacacagcaactgtgctagggaacctcctcatcatggtcactgtgacctgggagtcccgcctccacacccccatgtacttcctgcttcgcaacctctctgtcttagacatctgtttctcctccatcactgctccaaaagtcctagtggaccttctttcaataagaaagaccatctccttcaatggctgcttcactcagatgtttttcttccacctgcttggtggggcagacattttctctctctctgtgatggcatttgatcgttacatggccatctccaagcccctgcactatgtgaccatcatgagtaaggggcggtgcacagccctcatcgtggcctcctgggtggggggctttgttcactccattgtgcagatttctctcttgctccctcttcctttctgtggacccaatgttgttgatggtttctactgcgatgtcccacaggttctcaaactggcctgtaccagcacatttgctcttgaagtcttaatgatttctaacaatggcttgatctctaccctgtggtttgtcttcctgctagtgtcctacacagtcatcatgacaatgctgaggtcccacacaggagagggcaggaggaaagccatctccacctgcacctcccacatcaccgtggtcaccctgcactttgtgccctgcatctatgtctatgcccggcctttcactgccctccccatggacagagctgtctccatcaccttcactgtcatcatccctgtcctaaacccaatgatctacacccttcggaaccaggagatgaagtcagccatgaagaaactcaggaaaagactctgaccctctgcaaaggaatagatactaagtctccaattagaaaaatcagaacttaaagacaaaaaaaaccccaatcaatagaccatggtgaggctggtgtgtatctttactgtacagtgtagtcctcaaaagctagagacaattgtctctctagggtttcttcatggtgaggttgatgacaacatagagccttagacataattcttgtcaattcttgaactggagagctggctcagttgttaaaagcctcgctgttcctgttcctgccaaggatctgagttcaagtgtgaaatctcacatcaggcagctctcaatacccataattccagttccaggggacctgacatttctggtgtctgacagaaccaaatatacacatgtacataattaaaaataaaattaaatgtcagctcttaggaactcaaatgcttataagactcagacaccttgatttactgttaagaaaattaaatccaagagaaagttaggtcttatggggggcagtttactggtttttgattggcttatttttttctgtgtaatgctaagaattgaacttatgagatttttttatcctatcaaaagtgtctaacccaccaaaggtcagtattctataaacctcccctatctaatgaaacccctttgtattgaaaggccaggataaagaagaccccctcagcagacaaaataaggcctaggatatagggtggctagctggttcagcaactctgttccaggaaaaggctagccatattagaatcttacaaactatcttaaggaatagggagtttccacttgtgatttccctcgggacctttcactggtattctgggtattttgggttggagtttctttcctcactggtattcttggtattttgggttgtggtttcttcccttgggaccttccactggtatttttggtattttgggttgtggattcttcctttaaaaacccctattcccagccattcggggtcgaaactcctctacccctgcatgggatatgagtcttggccccagtgagctggttcctgtcaataaacctcatgtgatagcatgagttcttgggaggtcacgtcatcccgagacttgagtgaggatcctccgtctcagggggtcttacagtatctgtctatttgcccaccatccctgagacttcactaccacatctccttaagctgattgtgaattagccaatcacatcagattaggagatcacattcccaccaatgagaagagacacagccaccaccattagcataaaaactaactgaagtctcatccccagtgtgcttgcttgttccatttgcttatggcacacttagggctggtgagatgactcactgtggctaagagttgtggtgcacctgtttttcaaaaagaaattaccttactgggttatatgtagtgtgtgtgtgtgtgtgtgtgtgtgtgtgtgtgtgtgtgtgtgtgtgtgtgtccaagaatattcttttccagcaacctatggcatcacacatgctaggcgagtactctgccacagacgttatctgcagccaattgcaactcttgaattgtgtctgcacaatgtattgtccaggcaacaatcagtaaatgacctggggaaaagttaataaaatgaagtcacatctccccatgtggaactagctttcctttggaagattcccactccattttcctgaggaagctcccaaagttccccttcaaaagatgaaaaagaattcagatttcatgagaagcccagctagagctgatatatctgactctgagattagaacagatttgattactcctgctacctcagacacacaaactcacaaatttgaaacaaactcacaaaaagaggtggggaggggaagagaagaaaaaaggaaaaggaaagggaagaagaaacttttctctgctgcagtgtcatgaaaggcacttggttgccctcacctgaccagacagtacaaactgtaaggtttctggtacttaaaaattcatcactttacaccattcgattctgagcagccttccatgaagaaaagaatcccatcctgcccacatctcctaagggtgcctgacaagaaagaagcaaagcttttaaaaccctcctttctggagcctggaggcctaggctgctcttccgggaggcttgggttcaaatcccaacacccacatggcagcacagaaccatcactaactcccaaaccactgtctacattgccagttcagtccattgtctatgtggtctttgtcttttgtaccttctcttttttttttttttttttttttttttttgtttttcaagacagggtttctcagtgtagctttggagcctatcctggcactcactctggaaaccaagctggcctcaaactcacagagatccgcctgcctctgcctcccgagtgctgggattaaaagcatgcgccaccaatgcccggctagtacctactctttaatgtaaagaaatagagaacaagatttaattctaaagccagacatgctggttcttgcctttaattccagcactcgaaggacagaggcaagtggatttctatgagttccagaccagcctggtctacagagtgaatttgagactgtccaagcatacacagtgagaccttctttcaaaacacacacacacacacacatacacacacacacaaataaattctagcaaccttatctgtcagttacagagctaattgattttgttttttagatgtaccaattttatttatatcagtgttttgtccacatgtatatgctgttgtacttggtgcctgtagaggacagaaaagggcatcagatccccctggaactggagatggttatagccaccatgtgggtcctgggagttaagcccagggactctacaagagcaataagtgcagcaggtcatggtggcccacgcctttaatcccagcgaagaagagacagaggcaggcaaatctttgtgtgttcaaggtctatagaggtagttccaggacagccagggctgtatagagataacctgtccccacccccagaaaaagatcaataagtgctcttaaccactaagtcatctctccaaccccttcaagtccttttgacagacaattaagaacatgagttggggattaatttttaactattaaattagttgcttttctatcactgtgataacacaccacaactaataaaacttaaataagaaagaatttatttggggcttatggttcctgaggagtaagagtccatgaccatcaaacagagaagcgtggcagcaaccgggcatcttggcagaaacagctgagagctcacatctcagcccacaaactagaaacagacagagaaaactggggattatgaaatctcaaagttcacctctagtgatgtattttccacctccaggaaggccatacctcctaagttcccccaaacagtgtcaccaaggggggggatcaggtatttaaagaatttgtaggacatcttattattaccaccacaattattattccttggcaatttcatacatgaatataatgtgctttcatcatacatgctcccattattatctcttacccctgtcccactaaccacttctcagcacattctcctcctgctaattccttccctccctctctcttactgtctctccctctcaattcagttagtgtcgtttgcatgaacatgggtagagggttatttataatagtggtgtatgggtaaataaccattggctacacaccacagaagaaaattattccccctctctaggtagccattaactgccaaagggttctcagggaggggtgtctctcaagcccctccctcactgtgatggtttgaatgggaatggcccttctggggttcatacgtttgcatacttggttctctgttagtggaactgcttggaaaggactgggagctgtggccctggaggagctatgttactgggggtggcatttcagatttcaaaagatgtgctacattcgcaatgcactctctctctctctctgtctctctctctctctctgtctctctctgtctttctctctctctttgtctctctctctctctgcctcctacttgtggatcaagagtgagttctcagctatttctgccatcatgcctttgctccaccatcatggacccaaattaaactcagccatggtgtctgtgacagcaacagaaaagtagtttctgttgaaaagaatggaatagtgaaggggagagaggagaggaggagaagaggacacatgtgaaggagaccatcaacacgcgtggcttcattcactggcacagctgaatgaccgctcctgctcaccaacctacctctgagctttccgctcagatgtgacttctcttttgataaattatatatcaaaaagaatataaaaataaataactctcaaggttatttatttcttcaagcaaatcttcatttcttcagcagaggtaagtgttgcctttgacttcagtgtttatatacaataaaatttaccctttgatatgtatagaattcaatgaattctgaaagatatatattctctttcagatagatgtatgtatgtatgtatgtatgatcccatcgcttcaaaaactttccccatgtcatccttgcagtgaatactttctccctcaccctctttacacacagacaaaatgctgggaaactttattcgagactataaggacaaattatcactaattgccatagcagagcagacagaatgaactcaagtctaaacaaagtaaacacagataggaaattgtagtcaagaagcagaattgaaggaggatgctattgggcacagttacctggaggggacattaaggtcagggctttctgactgagctgactgagatgagtaatattgtcaacataacagaatctagactcacctaacagacagacctctggggtgtctgggaaagagtttctaggtgagtaggtgtcaacattccacgagctgggatgccagaatgaatacatggcgaaagagagctgaatactagcattaactgttctctctctctctctctctctctctctctctctctctctctctctctctctcgctcgctctttttttggttccagttgtaattttttttccttttttttctttttattttaattagaaagaagattattttacctgtcactcccaggtccctctccctcccctcctcccctgaccccccaactagcatcttacctattccataccctttctgttccccagggagggtgaggccttccgtattttcagagtctgtcgtattctttgggatagggcctaggccaacccctgtgtgtctaagctcaggaagtatccctccatgtgggatgggctcccaaagtccattcctatgctagggacaagtactgatccactacaagggaccctatagatttcctaggtctcctcactgacacccacatacagggggtctggctcagtcccatactggtttcccagctagcattctgggaaccaagagctcttccttgttcaggtcagctgtttttgtgggtttcaccagcctggtatggacccctttgctcatcagtcctccctctctgcaactggatttcagttcagttcaaggtttagctgtgagtgtctgtttctacttccaccagctgctggatgaagactatacgatggcatataagttatttatcaatctcattatcaggggagggcatttaaggtatcctctcttctgttgcttaaattgtgagttagtgtcatcattgtagctctccagacatttccctggtgcctgatttctttttacacctataatgtctccctctattatcttgctcttttctgttctttccccaactcaacctccctgccccatcttctccccttctcattctcctagctccctctccctcctcctatgctcccaatttgctcaggagatcttgtccctttccccttctccaggggaccatgtatgtctctcttagggtcctccttgtttactagcttctctggcagtgtggattgtaggctgataatcctttaatctatgtctaaaatccacctatgagtgagtacataccacatttgttctcttcttcattgttctcttcttctcaactcggggtacaatgggaccaacagcttcacactgtcaccatgacttcccctggtgacacacctcctccaacaaggcctcctcctattccttcccaaacagtttcgtcaacttgggaccagtcactcaaacatttgagcctatggggcccattgatggggaataaattttttgtacactgtgaaaacctgtctttgccaggttgcctttcagattgtttaataaagagctgaatagccaatagctaggcatgaacaggataggcgggacttccaggcagagagaaaggaagaggagatgaatctagacatgggagagatgccagaggaaacaggaggtgcaagacagaagagaggtaaaaagccacgagacaaaaatgtaaattaatataaatgggttaatttaagttataagagctagtgggacaagcctaagctgtaggccaagctttcataattaacaataagtctctgtgtcttaatttgtgagctggcagcccaaagaaaaatctatttacagcccatcctcattcaagctaccacattatgcttgctctaaaggacccaggggacaagtgggtctttcctgactcttcagtctctgaggaccctgggtgcccataggtttgtcactaaatctttgttttccttcccttccttctctttccttcatggtgtcctcagaggggtgagagacttcatttttcatgtacataaagttttttaatatatagatctttgtgtactatttaacaatttttttgcctgaccaacagccactaagatttttctcctgtacctgctagaagtaatagctgatattgcctctggtttcacatcattgtctcctcttttgaagtttaaacagaagtctccggtaaggcattctcgcacgagcaaatttgtactttgttggaaaatctttaagggcaagatccaaaaaggccctttctttgtttgatgaataaaactgaattacaaaggaacttgaattaaagttacttcttaagaagatcaaactgttaaatagtatttaaaagtatttgccttagaaacgcatttgattcaagtatgtgaatgacgggcctcttacagactggggtcttggaactgttagactgtctctttgtcttaactgtagccaggcttctttaagccacttctataatagtcctcgagccttaacagcagaaaactgaatgagagctagaagaaaggagtgacccagcctagtgacccagggatggaagtcaagaaaatgttcaggtgaagtcaaagccacatcacagccatccataattccagtttcagatgatccagtgacctctgctgacctccacaggcaccggaaatgcatcacacatacacacataaacacacacacacacacacacacgcacacacacacgcacgcacgcacgcacgcacgcgcagtcaaaacagtcatataattgaaataaatataaattaatattttttttattttttcaagacaaggtttctctgtgtaatagtcctcagtgtcctgggacttgctttgtagaccaggctggcctcgaactcacaaagatctgtcacctctgcctcccaagtgctgggattaaaggcttgtgccaccatacctggtaaaataaattacttttttaataatgacagtgggggctgtagagatagctcagcagttaaaaaaaaaagatacttattgctctatcatgaggactggaattcagattatagcacccataactccaactctattagatcagacgccctcttttggccttatgggaacctgcacacaggtgtgcatgcacaacagacacaataaaaacttaaaatgaaaataaatcctttttaaaaatgaagatgaaagggatttttttaaggaggagaaaaaagaattacttactgaaggttatagcaccagggacctttgtctgggtattcactactttttctgtgtcaaacacaacttaaggaaggaatggtttattttggctcacagtttaagagtatagtccatgtggcaggaaggtttggcaggagtttgaagagagcggccatgttgtatctgcagtaaggaggcagacagagatgaatgcagatgctcagctcactttctgctttttattcagttcaggacctagccatggagttatgcctctcacattttgggtgtgtcctctccctaaattatcctacactagaaactccctcatacaactgtttccatgacgactctaaaacccagcaagctgacaaccaaaatggatcatcacagtccgttctatgctactgtgacaaaatacctcagcctcgggtaatttatattgaacagaaatatattgggtatacgattgttcaggctgtgatgtccaagacccaggagtcccacctggtgacatggctgacagcattatgtgatcagacagcaagtctgcttcaaacccctttataactaacattactccattcataaaggtcagttgctcgtgacctaaacatcccccagtaagccccatattcccagtgccattgcactgggaaccaatttttcaacccacagactttagggccacattcagactacaaccaagaaagaaagaaagcatagcaagaaacatggtagccatatggactacgtctcatagtgcttttagaggttgcgaggatgaagggctgtgtcatgtctacaattagagaagttgctctggttgtttgtcaagaatggcaaaacctgagatacatactgctagagtccaagaacaagacaggggaagtctttgaggatagagaagtgcaatgaatctgctgcttacaaaagagtttacagcactggtaatggtctgggtgacgggaatgaagagaaaaggatcaatgtgtttgtatagaatttttcaagaaggtaaatgcaatggtggttcattatggacagtttattctatgatttgagttatgtccaccccaaaatcatatgctaaaatcccaacggcttgtcccaaaattgtgagtttattggaaaagagggtctttagaaaggtgtccacgttaaaatgtggtcaccagaatggactctgatccattataattgaggcccacctaaaagggtgagaaagacagtgttgactgacactatccttgtccaggtcttctgcagacagccatactgttgaggtatcatgcctttcctgtcatttctaagaaacacaatctcatagccaacttcccagttcttttactccgacaagttttctgtctcctcttctttgaagtccttgaccttggtgcaggagttgtgttgtagatatgtccactagggctgggctccctacactagttgctatactttgaccagttgtgatttcctctaatggtcttcattttctctaaagacaagcatctttggtgatggtgaagagctgcactaatctgtggttatgaggataagtatttaggatgtggctgggaaacacgaaggtctagtaaagtggccggagtggactctcctctaagactcatggcctaaccagccccaggtggaggaaatctcatgaggtctctcttagttagggtttctattgctgtgaagagacaccacagccacagcaactcttataaagaaaaacatttaattgggtgacttacagtttcagaggtttagtccattatcattatggtggaacatagcagcatgcaggcagacatggtgttagaaaaggagctgagagtggagaaagagctacatcttgatcccacagacaacaggaagtggtctgagacactgtgtgtggcttaagcatatctcaaagccctcctccacagtgacacacttcctccaacaaggccataactactccaacatgtgccaattacattcaaatttccacagggttgcctcaaacaaaactacaggcaatgactaataaatgctcagaaagggagaaatagtctccccctatacaaagtggtcacccctgaaatgatatacatataagcaacactaaacacactcagtagattggatatatatattggttttttctttttttttagattttatttatttattatgtatacagcattctgtttccatggatatctgtacaccagagcacccgaggagggcaccagatctcataatggatggttgtgagccaccatgtggttgctgggaatcgaactcaggacctctaagagcagtcagtgcccttaacctctgagccatctctccagccctatatattggttttttgagacagggtttttctctgtgtagctttggagcctatcctgtcactcgctctggagaccaggccggcctcaaactcacagaaatctgcctgcctctgcctccttagtactgggattaaaggcatgcaccaccaacgccgggcggattttatttatttatgtgtaaacatatatctctgtgtgtataacaataaccgttgaagaaaaagaggccatcaatttcagagaaaatgagggacagagacatgggagtgcttggaggaagaaaagggaacagggaaagtgatgttatattttaataaaaattacacaaaaagaaaggaaaaaaggaagggagggaggaagggagggagggagggaggaaggaaggaaggaaggaaggaaggaaggaagaaaggaagaagaaagaaaggaaggaaggaagaaagaaagaaagaaagaaagaaagaaagaaagaaagaaagagagtaaggaccaagagaaaagagaagacaaagaaatatcagcccaccaagccaagatccgatatatttggcagttagcagtttccaaaaatgcaataaggaaaaaaccctgtgctgtactcaaactgtcataagtgtgcctgacaaaataagaacaacagcgttaattcagtgctgactatgtggagattgtcagttcaccaaatcctctcgagaatcatacaggacgctatcccccacccctaccccttggcggagagaaccagacacaggacaggtaggcccatacctgtttaggaactctgcccaggccacacacccaagagaagctgaccaaccaagtgctgagataagtgactaggtcatcttcatggatccacacagacgcccaagccccgaggttcagggacatctcagacgagggagcaggaagaattgtgctgctgccttcagcccaggactaagtcattgcactcacgaactcacagcagttttatcagagcctggcaacaccctgccgaaactgcaccactaagatcctccccaccccaaccccaccactaagaccccaccccaaccccagtcccaggctgggccaggctttgcaaacacatttcccagatttgccctttgtctttgtgttctatttctgatattctctgccaatacagaaattaaatttttgacaccatcaaattcgtcacccttttatttatcgcttgcagactttaaatttttcctgcttggaaaattctgctctattttaagattatgctctaaaaactctgctgcttgctcctaatgacaatgtacagaaatacttctttttttccctttttatcaactattatgtatgtatgtatgtatgtatgtatgtatgtatgtatgtatgtatgtatgtatattgcatttgggttcaatccaccaccattatctctctccaattgtacagaaatacttctaatgtttcaatttttggtccatgtgaaagttttgctgccaagtgcaccatacgagatgcacgtgtagcagagattcacaactaagcactgcgatgaactcctgaaatccagctgtagagagggtggagtgatgagcaaagggttcaacaccatgctggggaaagccacagaaacagctgacctgaacaagtggaagctcggggactctagactatcagctggggaacctgcataaaactgaactaggccacctaaacttgggagcagtctatggggtcactggcagtggaaccagtatttatccctagtgtgtgaatggggtttttggagccaattccttatggagggataccttgctcagtctggctataggagggaggccccaaatgatgtgacagactttgatgattccccatgggaggcctcacccactgatggggtgggatggggagatgttgggggtaacgggaggacaggaggaagagggaactgggattggtatatataaaatagtattgtattttaaataaaaaaataaaataaagaaacagatgcacttgtgcggaactgtaataggaatacttctaggagacaacaaaagaaacttgtaacagttaaacatgagggagaattttgaattgcttcccttgtgcctgacattgatttctaagtaagtaattttatatcagtaaatacagtataaagccaacgggcttgtagttaatcagcactgatggtcacaactttttaattctttaaagaaagaattgtaggcgtgctccatcacgcaatagaagcaactttttttttaacttcctttttacttattctttgtgtctttcacatcatgtatctcgatcccattcgtttccccgttcctttgtatccgccctctgcccttgcagccaccaccaccgcccaataaaataaaatttaagagaaaaaaggaaaaaagtaaagaaaagcaaaaaagaagagaaggaaaaatgtcatcagggaagccttaggcagacacagtgagtaggtccccagtacgcgagaggactgcaggctgcgggactcaaccaaacgccagcccggccttctagcctggggccacggtgagtcagacccccagaacctgaagacatggatgaagccgcgcaggcgcagtggcagcaggagaagcaattcaccacctgcacctcccacaagagaacaccagggggcggtctcactggtccaggtgatggacgaaacctacggagaacggcagaggaaaccgccattgatgtctgtacgcaatggctcccgcccagaacccaattagtgtttaccgggaacggactgaaactaaaaccgcaacattaataataaagcgtaagaaaagactcacttggttccactggggctcgaacccaggaccttctgcgtgtaaagcagacgtgataaccgctacactatggaaccacgtggtgggaagcagttctgatggtgaataatgaaaagtttggatgttaatggcaaatggtaaaaacagaaaattataaaacggctctcaaagaaagaagtttcagacttcacccgtatttcccaacactgggagaaaaaaggtaaaagcagcaggagccccgcgaacacacaaacactgatgtgtcacagcaaattcagtagcactggccggctgaaaagtgaaagctcctcaccacgtggttccactggggctcgaacccaggaccttctgcgtgtaaagcagacgtgataaccactacactatggaacccggtgagcgagtggctttccagatagactaactacacttagagacactgacgcgctgaaatgggaaacaagatgcttctgtatcctaagccgggaaacttcaggacctcggattttctagcgccgccgctctgctctctcctcgctgcacaacccactgttgatggaggagagagagaacgggagagggggagacagagagagagggaaggagggaaggagagagagacagagagacaagagacagggagacagggagacagggagacaaggagacagagagaccgacaaacagagagggaggcagggagggaggaagggagggagggacggagggagggagggagggagggaggaggacaggagagcagaggagaggagaggacaggagaggacaggagaggacaggagagagagaaaaccgccctcgagtggtcgctcctgctctgatgtagacagtaccgagaagaaaacacacctggctctgtggcgcaatggatagcgcattggacttctagacagatgaaggaattcaaaggttgtgggttcgagtcccaccagagtcgcttttattttagtaaggaagaataaaataagagttgcgaagaaaagtgaaccaaaatccgtgaccatttaagttgtcctgcatggcgcacccattaagattaaaagaagtgggggtgctgttaatcgcagttgttgcctgagtccgaccacttggggagaacaggaatctttccgctactactaccagagagttactctaaatcaccttccaccatcaatcacactcccaaagtctggggaaacgaagaaatgagcgaagtgtaatcacagttactaatcgccctccgtttgtgactttgtatttcaatgttttgctttataagagtagaaaataattttagggctttttagaaacttttaaggctcagggtgttgtcccagttgctgataaattaaagcctgtgcttccatgtaccagaatggccgagtggttaaggcgttggacttaagatccaatggatttatatccgcgtgggttcgaaccccacttctggtagatgcatctttttctttcccagcccctacaacgtcgggacacagaacggaaggcacaaggagtcgtagagaaacattcacttttttcaacactaaactctctaaacccagttacgtgccggatccttttctgatggctagatacaggagtgtagagaatttaaaagtaaaatttctaagtaaaatattttaaaaggaaaaaataaaaagcaaggtgtttacacataaggcgtgacataagaaacagcagaaaaataaacagaagggtttggtgtgtggtggcacagcgacagagcaggctcagcgtctcccctaaccgttccggggctaaccaaacatctctgcaggatgtctgttagggtctgacggactttctcaaaccaaggggattcaaaagtgggatatgaagtcgctaaatgggatgcagctcaggttaccgctctacgtatatcaggtctgtgccacactacccttgatgacacggagagagtcgtgtggccacggggctagcctgaaaagttgaacttagttacattccacatctgatgcttagggtcccatacgttcgtttgggagaactacttagatcatgtgtgattatccaaatgagggtggggagaggggaaaggggtggtgggttcaagttgcgatccgcccgatcccacagaggaccaagtctgggtctttgcagcagcacgagcttgcagagattctggaactcggcatatgctcaataaatgtcaaacacaaacagaacctcaaattatgcatccccactgcacccacaagacgctctagggcgcctcaaaaaacaagaccggaattagaaatgtctccaccagctccagaggccataccagagcgtccaaattatggggcgttcgagccgggaagtgctcttcggaggcctcacgcacgagggatctccaataattttagtctttatagtctacgtgtgaccagagagaagaaagaattgatttcaccacacgcttgttcatctcgattttgaagaaatagcaaaagactacttgcaaagaatttagattctgggcctaattttggctgtggatagtcttgggaagaggtctttgccaagagcccggatagctcagtcggtagagcatcagacttttaatctgagggtccagggttcaagtccctgttcgggcggaagttgttttagattcctatgtccaatcctgactaaacaaatcagcagtcagtagaatcagttctatcgaactaatacccttactccagttatgagacatgaatgtaatcagttacgagccactatctccgagataacagcgtccttaaaaacactagaagtccccacctaaacagtaggtcatgcgcaaaaaccaaagaaattggaaagatgagcagtaaaactggtgtattttacagtcttttgtttgtaacttaagaaggataattaagtcttataataaaagaattagacgagtatgtagtgataatcttgtttgtacaaataaaagttgcctgaagatcagagagcgatcttgccaccaactaaccacacaggtctggaggtctgtacagacaggaagtgagatggctggttggagagaggaagtgataaggcaggagtcaggagctcagtctattttctgctgggaagctgtggttttgcccctttgtctccttaatctctcagcattttcccctatatctgaccccagggttttattattaagacctaatagaactcatgctacactagtaaaagaaaatacttaggtataaaaagaaaaaaaaaacttacgaaggtttctttggggggaggggaaagagtattaaaagtagggctcaagaagtaacatgataagggctgaagagatggtgtatttgcttgcggtattggctgctcttgaagacctgggatcagttaccagcatcaacaagtcagttcacaaccaggtataactccagttccaggaaatccaatgttctctgcaggttcaggcactatgcacatccatacatgcaggcaaaacactgaaacacataaaaataaaataaaacatttaaaaaatgtaaaagcagctcagaattataaaaataaaagaaaaaactggggcaatcatgattgattattacaggaatgaataaacaatactgacaaatatatacaactggtaactaagtttccatttccaggaaatgatagaataaaataggcagagagagaagggaggaccagggctagaacaagaaaactagaaaaaaaaaaaaaaaaagttccctcttcccatgttctttaaaatgaaaaacgttaaacctttggaagtcaccagcataaaatatggaaaaaggtccccatgcctattgatctttagatgtcataatatgccagaagtggattatttttcccttgcaatctatatagtaccccaaattctcaaattgttctctgtcttaaaaaggaaagaaagaaaaactgcagacagctagtctattagttaggtcttctctgttgcagtgataaaacaccatgaccaaaagcagcttggggaggaagtgatttgtgtccctctgtttccacatcacagttcatcatcaaaggcagccagggcaggaactccaaaggacaggaacctggaggcaggggctgattcagagtccatggaggagtgttgcctactggcttttcttccttggcatctcagttgcctttcttataagatgaaatgggctgggtcctcccacattaatcactaattttgaaaaatgccctacaaccatgccgacaggccagtctcagagaggcattttcataattgaagttccctcctcttagataacactagcttgtgtcaaggtaactagccagcacacatatttagtaagtttaaaacacagcaattttgctaataaatgaagaaaaactatatactaagatatactagaagaaattaaagacaagtggtacagaatttagttgaggctaatctataacttggaaatattatgaagacatggtgtaaagggctgaaaagaaaactctgttccagcattgattttattattattattattattattattattattattattattgtgggttttagagacagggtttctctgtattgctttggagcctgtcctggaactcgctctgtagaccaggatggctttgaactcaaagagatccgcctgcctccgactcccaaatgctgggattaaaggcgtgtgccaccagcgtctggctccagcattaattttaaatgccatgaagaaaatatactgtctaacaattaatttcatcgattatgaaatgtatctcgatttcaatcgactacttcaaaaatatttgagaatgaatataaggtaattatacttcaaagacaccatggtggcacacaactgtaattctaccatacagtatatagaaaaacaagtagagagttaaaggcctgcctggtctagcctgagctacataaggattctaacctaacataaataaataaataaataaataaataaataaataaataaataaagggctggggataaggcttggtatttcctagcactcccaaggcatttggatctttgctctccagcacaaaaagagaggggtgtgtgtgcaaagacatggggaggaaagacagagaattaatcttagtatattgtatgccaagaacatgtattcttccaaaattttcttctgataaaatgctaggaattgacttgaaccacacactaaaggctatgtttgagtgccccccccccttatttttaaagagtttgtccctctcttctgattgataatagggctgataggaaggtgtcaaaaacaaaatatgttcaattggcccagaggagcgggaggccaatccccgggctactgagtcaaccctggcattacctaagattactgagtctttggaggactccctgccagtgatttaaggctgcttctacagagctggcgggcctctaggagcttggctataaggggtccattagctatgggtgtgcccttggttccttccagaggtcagaatggatataggttattaaaaagcatatttagagtcagtatagatgttagcccttgacccttggccatctggagtgctctagtcaaggcgatttattcagccttttgtgaagagtttcctattagcaggcgggttgctccaaccttttcagtggaagtaaccactgcatacgccacctggcggttttctggttttctgatctatctacaagagaacttctgtcaacaaacagggtgagttgggggtttgtgagtggttggtctaggagaagagaacaggctggggggggaggggggagcggttggcctccacagcctctgggtaggagtgtgaggaggtgtcagagggagaggggaagagagtagggttgcaggatttagggcaggactggaggccaaggtaattaatatgggggttttctagaaaaagtaggtgaaagactcgtgagcgtccaaggagggaaacagaagaatgactcagaagagaaagtctgagaggcggtgggtggaatacactgtgattggcctgaacaaggtgatcttgagagcctcacgggtgagttcagctgctgctgccagggctctcaagcaaggctgccatccacagacggtgaggtaaaaaataccttcagttcatctgacctcgacgtgaaaccacagaacaaacatctcctctggtgtccctaaatctctctttaattgttaatattctgggcactcatccacctgtgggacagggaatcactgtgccagcataatattgtgggctgtgcaagctagctagccacattgtgtccaggaggaagaaggggaagtgactatggagtgcaggaagatagcaggggcaagtgctattgaaatgtgtatctttccagatctagaaaatgccttgagccgggcattggtggcacacgtctttaatcccagcactcgggagttcaaggccagcctggtcaggataggctccaaagctacacagagaaaccctgtctggaaaaagaaagaaagaaaaaggaagaaagaaagaaagaaagaaagaaagaaagaaagaaagaaagaaagaaagaaagaaaggaaggaagaaagaaagaaagaaaggaaaatgccttggtctggggtgaaagggcagggtcaggaaccacggtgctatatttttttgcatatttttatttgaattagaaacaagattgttttacatgacaatcccagttccctctccctccagtcctcccctaccaccacccccctcaactaaaaccctacctatcacttatcgtttctgctccccctggatggtgaagccttccaaagggggtcatcagagtctatcgtatcctttaggatagggcctaggctcacccccgtgtgtcttggctcagggagtattcctctatgtggaatgggctcccaaagtccacacctatgctagggataagtactgaactattataggaggtcccgtagattttcgaggtttcctcaccgaaacccatgtccctggagtctggatcagtcccgtgctggtatcccaactatcagtctggggagcaagagctccccgatgttcaggtcagatgtttctgtgggtttcaccagcctggtctgaaccctgttgttcttcactcatccttccctgcaactggattccagttcagatcagtgattagttgtgggtgtctgattctacttccaccagcagctggatgagggctatagggtggcatgtaagtcagtcatcaatctcattatcaggggaaggcatttaaggtagcctctcctctgttgcttagattgttagttggtgtcatctttgtagatctccagacatttccctagtgcctgatttctctgtaaacctaaaatgtctccctctattatggtatctccattcttgttatcttctattcttcccctgactcaacttttctgctccctcatgtcctccgcacccctcctcttctccccttctcattctcctagctccctcccccctcctcccttgctcccaatttgctcaggagatcttgactctttccccttctccaggggaccatgtatgtctctcttagggtcctccttgtttcctagcttctctggcagggtggattgtatgcaggtaatcctttactctatgtctaaaatctgcatatgagtgagtatataccatgtttgtctttttgtgattgggttacctagctcagaacggtttcttctagttccatccatttccctgctgtgctgtatttttaagcacaatgtaaccctatgttaggtgctcttgtcactcaggcctcactagccaatcaggccctccagatgagcctctggtcagagtgttgctgagctcttcgagggcaccattttcaggcttggctttgaaaaggagctggcaccagtgattttgtgtgctgtgcggtgattgctgctgcagggagctgggcggggtgcttgggtgagctgggaaatcacaatatggtgagtgaggagctgctgtcccagatagggaggagcagatgatgaggtgcgggagccagtgtggtgggtcctccctgtagccagattccctgtcctgtgagatcccatgcggtccttgcaactccctagacccaggggcaagcctctgaataattttgctctgtgggctgcatctgctcagagcactggtagcagggagctgtgtgtagaaacgtctttctagtcaacttcaacatgcttttggtgcatccagggaaaacaagttgccaaactcggagaggcctagtttcaccagtatcttctagacattcagagctttgcatttaacctttatgtgtaagatacatttattgttaatttttgttttgttttggggttttttgttgttgttgttgtgttttgttttgttttgttttgttttttgagacagggtttctctgtggctttggaggctgtcctggaactagctcttgtagaccaggctggtctcgaactcacagagatccatctgcctctgcctcccgagtgctgggattaaaggcgtttaatccaccgccaggctttattaattttgtggaggttgtaaaaggcatttcatgtgttaggtagcactccacgactacgccgtgatgtagaattggtgatataaaggatttttaccagtgcttaggaaatagtaagtctcacaaagtggaatttaggtgtgggaagacttttttttttttttttaagtgttcagcctgcatgtatacctgcactccagaagagggcaccagatctcattacagatggttgtgagccaccatgtggttgctgggaattgaactcgggacttctaagaagagcagccagtgctcttaacccctgagccatctctccaggccaactgttgttattttgtaccaatgttaggataaagctgaaaggggatcctccggagtgtgggaccagggcagattccatggcaggagagggtgaccgaggcgagggacaaacacaccaggcagacagagtttgagtgagaagttttattagaaaggggagagagggggaaggaaagagaaaagaggtaaagagacacagagggagggcagaagagaagagggagacaggagcggacagagcagaaaaagcagagcaaaaagaacagtaagagagcgtggatggtggtggggtgtctttcttttaaaggggtcctttacacctgtgtgcagactattactcatggaaccctgggctgaccagagtactgcccgagtgcattctgccgggtgacaggggcaggccagcataatgcctgaatccttagaaagactgcctctaaaataccccaaaaataagtgtatgctaaccaggcccgttagatattaggatgctaggattgcacagatatttggctccaaaccattacaaagaagccgcccctgatttacaaccagacacgagacccatccccatatggaaaaataggcctctaacaatctgctcaaggaggcattgcagggtcacaaccaaccttaaggcctggtgtgccacaaagttctagtttacttcttgagaaaaacatagctctgccagatgggcaatatgacagaagatgacaactatttgaaaggtaaaatgttgttggtaaggacttgcctgatcaatcaaggctttcattaaagccctcaggcagggaggaggaacattcttgaaagagctagtaaccacctggggcctaggccttaggagctttccctgagtaagagcctcatattgacaataaaacagaacttctctaaaaccaggaatatgcttgggagagctggtaatgttctggggccagggcctttgtggaggggttgcttcagatactgagaacccaactgttcccaccatatggagctatggttgtcagtcccaaggccaccctatgttccccttgtgtagcattgtttgattagcctcctccggaatttgtcctattgaatgatagtttctgtatagtttctgttgacttcgtaaaagtctcccatttccttccatccccgccccccgctccccgaactaatatacaagaagctattctttttaagaagcttgcttggcatgagacctcccaccccagcctttatcttttcgaccttctacttgtcctatctttctcatcccctgtgaccttcaccagaggaccctgtcactgaagaaagacctgctgtttcagatcactggtgtacttaaatcactctgggaatatctttgttgtgtaagtcctacaactcctttcaggctgggccttgacagctcagtgaggaggaaaaatggacaagttaatgtgtgtctgccagtctctggctttttttgaggggggggggcgtggacatacaaatgaagagggacctgtgcaagaactgagttcactgaccaactttaagttgatgtagtgacagtgcaggaaggagaggcaggaaggagagtgagagctttcgtgctccaacagtagtcgagattagcaacgaggaatcatgtaatccattttagatgatccatacatgccctggctgaccatttcttggggtccatataccagagcaatcaataatctagatataggactactgggattactgtagttacactggttcaaccaaatagaagatctgggtaaatggtgtggccctgcttagcaggactactattttaagatgtatcgccttggttctggagaaatgtcttagaggttaccagcattggctgctcttccagaggccctgagttcaattcccagcaacaacatggtggctcacaaccatctctaatgagatctgatgccctcttctggcatgcaggcatgcatgtaggcagaacactgtacacatgataaataaataaatacataaatatcatttaagaaaaaaagatgtatggcctgggggggggggtgagtaatctttgtggaacatgtggccatcaattctgtttcaacttttcaaaataatcatttgagattgtgactaattcatgcccatcccttgtaggcagtctctttcctacctacaagccctaccattgacccattattttctaattcacggcctgtttttctttaatcgtagttacacagtgacaacagttactgtttgaatgtgacctgtgtttggctgtaggacttcccagctccactggacaatctgtgttttggaatttgtacacaaaggactgtgtgcctggaagaggaagaggaagtgctctggaagaatttctactaacatgcaaatttctcagatttctgtctgctcctagagtggaagggtagagctaggaaggcctctgctgtctgtgtcatttgatctctgatcgctgagtaggggagctgctactgtctgagccccagctaggtggccatagctaatgtggaccctgggaagacttagcacacaggagtacctgtgggaagtaatttgcaggttctttctaggattctcctctgctgtagggaactgtaagggaaaccacaagccatgtcacggtgagtgtggggaccactgaccccagactaagcagagcagttctgctaagctgttggagctactgtgcctgggatggccatgagtcagactggttctgttggtccatgtggtgacctgggcagtggcccttctctgagactccctaagtgtggattctgtgggggagggggaggctttgcttttagtgggaactgggaagacagattggaaaactgaaagtgtggtttctagaagttctgtatattgcttcccacattcaggtttgtcttacaaatgttaaatagtttaaaaactggtagaaagaagtgttgggggtcaccctccagcagtatgtaattacagtgttttaaaatttctgccatcagtctccaactgattcaggggagaaaagaagtttctgagctgcagagatatttcagacttgcatgtggtttggcaggtggatagggcaaattccaaattgtgctccataatccatgtatagaaatccattgaatcctctgacaaccatctagtggagactttcatcaccttcaagtgataggagacagaagggcagtgggacactgatgggggaagcagtttgaagacagcaatacccaaattcccaaatattgtttatgatattttttattcaaaaggggttggttataaatgactaatgatcccaggtctacaagagctagttccaggtcagcctccaaagccacagagaaaccctctctcgaaaaaccaaaataaataaataaataaatgattaatgatcacagccaatcttttttcataaaaaaggaatatgatatagaaatgaatactttatattggtatgagttttggtttattgatacaaatttaaggtcagtttgttatagtcatatttcttttcttgcttaggtaatgtgtatatacagctcatttaaaaaatgtaatgtatagcttggagtctcctggcctgtggactgggagcagatcaacctgcccctgcgaaccaatccatccagagtctgccaacatcgaagtgctagtcctgcctccatccaccaggagagggagtttctcagacctgcctgcacccaccaggagagccatcagagtattggacctgtttgcactcatcagaggagaaccttggatccatacccaccaggagagggagagaccccacctgcacccactggaagaagggatgggaagacgacaatataagaacagattcaacaacagaaaggccaatatgacaccaccagagtctaaggacactgcaccagcaagacctgaacaccccaacacagatgaagcagaaaagaatgaccttaaaaaacaaatctatgaaggtgatagagaccctcaaagaggaatgagaaaatccctcaaagaaatggaagaaaaaaacaaactaaaaaattcaagaagtcaacaaatctcttaaagaaagtaagaaaagacaagaaaaatcagccaaacaaatgaaggaaacaaaacagttcaagacttgaaatctgaaataaacaattaaaaaaaaaaaacagtccaagggaatgctggaaatagaaaagctgggtaaataatcaggaactacagatgcaagcataacagaatacaagagatgaaagagagactctcaggtgttgaagatacactaggagaaatagattcatcaaccaaatcttaagtccaatcttaagtccaacaaatccctaacaaaatatccaggaaatatgggacaccgtgaaaaggccaaaactaagaataacaggtaaaaaagaaggtgaagaaactgcacctcaaaggtacagaaaacattcaacaaaatcatagaagaaaactttcctgaacatggatgtcagttaggaggcctgggcagtctatggggcccctggtggtggatcagtatttatccctagtgtatgaatggactttggggtccattcagcatagagggatactgtctcatcctagacacatgggggaggacctaggccctgccccaaatgatgtgacagattttgatgatccccatagaaggcttcaccctccctgaggagcagaaggaggaatgggatgggagtttgtggagggtatgggagggatagggaactgggattgatatgtaaaataagattgtttctaacttttaaaaaatgtaatggataattaaatacagattatagatattcacctatgatagtcaaaactcataattatgttagttaggttttctagataaatagagttatatttcaaatggataggcattcttcaaacctttcaaagacctacagagtattgcatttaaatggtttagggtttttcatgacagtgggacacaactgctcctggcacaccaattacatcaaaaaggagatgggcatcaaagaaactcattatggagtttgctttcaacatggcaagactagccatttgggcaagaaactgctcttgcctggactgtttgactgtatgctgtataaatagacatgcaggatccacaggaaagtgactgctgaacttggcaaaacaaaatatgacagtcctgaagagttcctgtttcatggaagagtctgccaggtactctgcaggacacagagaaaaatgactgacaaactgccaatacaggtagacagtttaaaattccctgcttcactaaggagtctgccagacacactaggcctgtaggctggagatggatgccccaacattacagaagaactttgggcaactgtccagtgagatatctctgtcaattccaaagtcaatatattgtccttctgatgtctttgatggaattgaagacagatagttatggttatgggttttccttagtcatgataaaagataagttacatacaaaaactttagactcacaaagataggatagatgatagaatattttctttaagtttgccaaatgttaatggaataaacatcgtaactatcgtttttttcttcttaatcactgttttattatatataattttactatgttaaagttaaaacccttctttttacttagacagaaaaaaggagatgatggggatgtccttctgtatatgtttcttttactggttgatgaataaaacactgtttggccaatagaggtaggaagataggcgagactaggagacaaggagaattctgggaaagataggcagagaggcaccagaaagaggacaccatgtagaccacaaaggagtaacaggtccaggcattctctggtaagacaagaccatgtggaaatacatagattaatagaaatgggttaataactaagacagctagccaataagccctagtcatcggccaactgattaataattaatataacatctttgtgtgtttatttggggctgaggcggcagcggaacctggcaggaaagtaactccagcaacaggacaccttcatcttcagcatgataacgagatatttgggacctggagaattggctcagtagtactgctgctcttgggtacccaagtttgattcctaacacccacatgagattggtcagagccacctgtatttccttgtcctcgggtctggtgcattatgctgtgcaaatggtgaaaagacagaaatataagtgattctgtactggaaaaaaatttcttcatgtgcctgttatcttaaaagagaatgaaatttaagtgtataagttttgtcagtgagtacatcaagtgtatgccaggtatcagtgatgaccagaagatggtgtcttaactccctgtgatgggaggtacagacagttatgagctgtcttgtgggtgtggggatcaaagccagcccctgtggatgagcagccagtgttctaagtactgagccttctattcagccccacgagtttgtcattaatagcagtaaggtgtgactggcttatctaagttcatctttacctcagccctgctgacccagaagaaatataagattggtagcatcagaaacttagacgtggtgcttaaattttctgagcctaaatctccacaaaatgagggtaaagtacaaagaatgatcaggagagaaactgacaataaaaatctttagaagatggttgaccatttaaccaaagctacaagagtgaatttaactccagtgtggtaaagaggcagcaacgggagcccacaagctcacatgtcaggtgtaccatgcttgagtttagacctcctgtaaggaaggaaaaggaacatgcaggcaagcctgacttgtctgaatggggttgtactctgcttccccggtgcctgaaaaacctccagttaggaccctgaatggtgctgactatagataacatccaggttgtctggagatcctgagacttgaactgaagtctctccaaggctaaggcaatcaggcattcacaaagagttgtggagtttggaagaagtattagggatggagctttgggtgtgaaagcccaaagttcaaatgccagagagcagtgtttggggtgtagctgaggacaagttggcatgaagtgtgtactgtatccactcagctatggtgggtcattccccctccaggtcttccactctttctttacttttttgtcaactcatgtagctgtcagtgacagtaccctgcagccctctctttgcagtccccactaggaccttaaagctcctcagtctccaccccatcaatccctggtacttgcctgcctggcaggaataaggatgtcctaagagacatatctctccctttggctaacaactagtgaaacagtagataccatgaaattctaattcccctgggaacctcattgtgggaaaagactgactcctgcagatgagaatgtctgcactgaagaaacatttactccatatctgactaccttgcaggagagacaggagctgaggttgggggaggggttttagaggtgggaaaactttatatggcttattatattacttagttgtactattgttgccatctatcgaaacctgttaggaccccaaggttttctcttcatcactgttccaaataagtcacactggaaaatgtcatgtttacaatttttcgttaataagggggatctctgagttcaaggccagcctggcctacagaacaagtgccaggagaggctccaaagctacacagagaaactgtgtcttaaaaataataataatttgctctttttatcttttctattgttttccatcttaaagaatactctcaggattggagaaatggctcagaggttaggagcactaactgctcttccagaggtcctgagttcaattcccaacaaccacttggtggctcacagccatctataatgagatctggtgccatcttttggtgtgaggcatacatggaggcagaatgctgtatatataattaataaagaaatctttaaaaaatactctcagtatgaatgtctgactggcctgaaactcactatatagactactactaggctcttctagaacatcagacagatttgcccattgtgtctccagtgtacctgaattgtaggtggttacattacagacaactaaagacaggctttttatgtagccttggcggtccttaaactagctctgtagagcaggctgaccttgaatttacagagatccacctgcttctgcctcctaagtgttaggattaaaggtgagaacagacaggaaggagctcaaagctttcagtctgaggattcagagacaggatcacccttttggtctgagcattggtagaggtaaaaactctccagtggctggctgctctgcttttctgatcttccagctttcacccctgatacctgactcagggtttttattattaagacctattagaaatcgtggtatttctatggtggcatagacctgtaaccatgatactcagtggagacaggaatttcaggatttcaaagtcatccaagatgagaatggtctaaatagagtatggttggaggcccatggaacctaaggtggctgactgactcaggacagtgtctatagtcttccctgaagctctagaacttcaggttcatggcaccagcaagtgttagctgaggtatttaccagtccatgttttctattcttgataatgttttctgtccaaggcagcctaggtcacttaagggtcagactcatgttgcccaacagagtaatattctcctgcaagtgggtgaattagcctcagacaggaatgagctccctatttttatatgcaaaatatcatattcagtcctgaaaccataacacacagccaacagaaatggacccagcaggttttattcatatatttagggttagaggatagggatagagtgggttaaggtttgtgtgatgggccccaggaggtgtgcaggtgacaggtgtaatgaccccattgtagtgaggtgactccatacggtgacccgcactctagcataaagttgcctcatgactttcggcccaggccccgccctctccaggagataatcagccccagctgggccagtcactcgctcccgtggggacctgcttgcctgtgaccttccaacactttcctgtcatgcgtctcccgagggtcccaggttccctctactctcccccacaccaccacccccaagcgggactcgaacactgcacagactgggactccatcgctcgccaatcaggagcgggatctcagaagcagcggggggtggaagcggggagaagcaccgttgtccccgccccctcgccccgctcctcccttccccgtccccattgcgcgcgcacgcagcatgttctccgtgcgcactgccgtcctcccgggcctccggctcctagtccgaggctttgccgctcggagctccgcgccgcccctgcaatggccggtccgagcgggcatcgccaacatccgggtcttcgggagccagggacgaggcggctcgcacgaccggggctgggcgagcggcgccgaaggggagggggaggagcccgaggaggaggaggaggagctgctgagcgccgagccgctgctgcccaccgcctcccagcgcgtgtgcgtcttgcatcctgacgtcaagggccgggccggaaggacgccgcggaacacaggtaccggaaggagaaaggcggggccggaaggcggaataacgtcaccgaaagggcgagggcaggaacgagcggcgtcgccagaagaggaggggacccttccggaggggcgtgtaggcgagggaggcagtggagcgggttgcccagaagaggcgggacactagggcggaagtgctcactgaagccggaagggaggtgttgcgggcttgacggggacaagctgattgggcagggatgaagaggcggagccacggaaaagtaaggtggaggagaagccgggggaggtcaaactgaagtgcatccggaagggggcggagtttgggggttggcctggggcggtgtcctgttgagcatggggcggggcgtcgggcggggcctgggtgacggtggggcggggcttggcttgctaggcgtggagtctagatgagcttggggcgggatcctggtaacttggtttcttagcactcctgcccgctgctgcagcagcctctgcgatgtttcagggtctgtgcagccgcggcccccgacggacgccgtctgtactctcttagagttgcaggtggcggaggccgccgcgctggtgcacgcgctgcatggctggtcggtggtgcagactctggtggtgcccaccaaagtccccgacagcaggctcgtcttcggcaagggcaacttccaagacctgacaggtgagtcgccccaccccctccggcccgaccctgtggacggtggagccgtccgtgatcggaccccgtggtgggtcccggggacacgagtcccaccgctgtgggaagacccaccctcgagcctcagggcaggccccgaactggcaggtggtaggagggtgcaagaaatgtcactcacctgcccacatgtccctgcctcgagctatgggtccctgtccaggtccctaacaatctcagcctgatttcaagaaccagatgctttccggagcataaccccctacaccacacacacacacacacacacacacacacacacacactgtgttcctgccttgcagtactctgtgtgcatgcttgtgctgcatactctgtatgcgtgtgcagccctctgtgcaatcctgagtgcatacctgttcagtcctgtgtgctgccctctgagtacatgcgtgtgattccctttgtgtgcacgtgtgtgtgtgtgtgtgtgtgtgtgtgtgtgtgtgtgtgtgtgtgtgcaatcctttgtttgtatgtgagaccctcagtgtgggtgtgcatccctctgtgtacatgtgtgtggtcctctgtgtgtaggctgtgtggccctggcacagcctgcctctgatggaactttctctacccaccagagaagatcagggggtgtccagacatcacttctgtcttcctgaacgtggagaggatggctgcaccaaccaaggtacagcggcagtatgggctgaggacggttctgacaccatgcctgagatgacagcatgtgatctgctgtgaaaacatggagccacagggcctcaccacccctttctctgagctcggctgcaggcctcaggtcccctcactccccatttgccggcctctctgtagaaggaactcgaggctgcctggggcgtggaggtgtttgacagattcaccatcgtcctgcacatcttccgctgtaacgcccgcaccaaggaggctagactgcagttggcactggctgaaattccccttctcaggtgggtcactcccacccacacacgccttagtctttattgaggtgagcataggacaggtggtgcatctggatctccacagacttgctgctatggtgtccagtgtcccctcccatacagagacccccagctctgcacccccttggccgtttaaaccctgagaggacttggctctggccagcagagaccatagtgccaatagccactaagcgtgtgtttcaattctaggtctactttgagcagacattctgcctggctggaccatgagagaaggggcccccggtatatcatggggtcaggtaagggtgccgcacagtgtcccagctgttaaggtggggaacactggccacatgatgtgctgacctgtgtacagttgtgctgccctgtgatgaccatgatttatcagtgacgacctgctgtgcatggaatgaccttcaagtcactgtgtgcccatcctagtctgtaaccagcaggactgctgatgccctggcatgtgaatgatgacttgctgtgcccagactgacctgccagtcactgtgtgtgtacctcctcgtctgtaacagtctctgattaagccatgatatgtgagtggataacctactgtgctggactgacctgccaatcactgcgtgtgcaccttctagtcagtcacaggctctgtttatgcagtgatgtgtgagtggatagcctagtgtacgcagactgatctgctagtcactgtgcgcacattctggtctgtagcaggcaggcttcctgacctctgaaagagctgaccacgcccttgtttctagcgcaggagttgtgagtggattagtgtgttgatctgtgagtgactgctgtgatcccaagtgggaggatccagtggcccaccagtgggtccatctgggagccaggagtgatgcgctgccccatcgatcagtgtgtagtatggtttggggaccactgtccttgagaacatggtgctgacacccacaggacccccaggagcaccctcgcccctagcttctccacagccatccgtgtgtccgtgtccccaggggagtcattcacaaagctgcggcaccgggtgctgaaggagaaggaagcaaagatcaggcgcgccctggagcgtttgcgggacaagcggagcctgctgcggaggcagcgcacacagcgcgagttccccatagtatctgtggtcggctacaccaactgtggtgagggtccccagagtgcagtaccgcatctcaggagggcacgcaggggtgggtccctgagatggaacaccacctcagcacagagcacgcatgggagggtactcggggaccccaatctcaggacaaggcacgtgtggagggtccgtaatcccagccttgggagggtgcagcagccctcatctcaacacggggtcctcaggtctctcaccttgtgtcctcccgcaccccccacccagggaaaaccactctcatcaaggccctgacaggcgaggccgccatgcagccacgcgaccagctgttcgcaaccctggacgtcacagcgcatgcggggtcactgccgtcgcgcatacctgtcctgtacatggacaccattggcttcctgtctcagctgccacacagcctgatacagtccttctccgccacgctggaggacgtggcgcattcggtgcgcatctgcatgggccaggtgtcctcagggacaggtcactgcgtgggcatgttcctcaggaagtgggcacttccggtccccagaccgcccgtctcccacccaaggggacctagtgcctggggctgaccgctcgtcctgcttgcaggatgtcatcatgcacgtgagggatgtgagtcaccccagcacagagcagcagaaggccagcgtcctgtctacactgcagggtctgcagctgccctccgctctcctggattccatgttggaagttcacaacaaggtggacctggttcctgggtgagtgggggcgtgagagctcactgcaggctgcgtatgcgtgtctgcgagtatctacaccgcaggtgtctatataaccccaccattcctgtgacccaccgagccccttgcacgcaggtatagccccccgggcccaggtgtcctggctgtatcagccctcctggggcatgggctggacgagcttaaggcagcactggaggagtccgtgctgcgggccacaggcaggcaggtcctcaccctctgcgtgcgacttgggggaccccagctcaggtgagtcctggagcacctgcacagtgtgcacacacgctgcgtggcccacctgcctgtcagcacacttcccggcaggcaccacgctgacagctcctctcccccccagctggctatacaaggaggccactgtgcagcaggtgcaggagctgccagaaaccggtgctgcccacgtgactgtcatcatcagccgagccgcctatggcaggttccggaagctgttccctgggtgacaaccgatagtccctcccagattgactgacagctcattaaacaggatttgtactcgctcccctctcctcagtgtggctgtgtcgaggctgcgtggagggtccgagtcactgggggaagtgagcagggagggtcacaaaagggaggaggacagacacatgagatcgcatcccccaccccagtcgggcctctgaaccatacgacagggacgtagttccattctctcagctccagactgcagcgaagctgcagtctggatggagggtggggtgtccaacctcgggggacaccttttaactctgacctgaaaaaaatgcactaacactgaggtcacagggtcacgagtcacatgtcaggtttctgtgtggggatggtggaaattcccaacaagcagcgggtgcgcattagtgggtagagtgcttgtggttcagtacttggggtgctcgctgctcttagagtgctcaccttgcatgcaccacacaaaccaggtagggtggtggttcctgtggaaactgaggcaggaaaaaaacagtccaacactgccccccgcatcttcccaatgagagtctagcctgagctatgggagatgttgcacaaacactctgtcgcagtcagacacggttggctaattttaattaatggaggtgcttattgcagggtgatacagaccccatgtgacgggtcacgtgaccccatagcaactggggtggtgatgtgggacactctggaacttcagtcttcgggggtcctgatgaccggaaatggccaacaggctgcttcgcaagctctaggagttcaaaacctgcacctgctagtgtgactcaggcgggctctcccaggcctcagcccttcacaggggacaacaggacattccctgtgtttccaatagatccatgacctccgtaactctgacatccgttaccttgacctcatactgaagtctgtaccttgtgtcctggtggggactggacggtcagggccccagcaacttatggttgcgtccaataatgtcactcatgaaggtatcggcgcccacgaaatcccacgtgatgatgttggcgcaaccggagcccggccccggccgctgctttctcactcatgctctcagggacaggtggttgggcaacatgacctcctccagggacccagatgagtactccacgttttccatgaggttgatgcctgccacaaacaggccacctgggagggaggagtggtgtcatgcaagggtctacatcacagcaggtgagactgacaggatggcatccctagagaagcccaccaccctgtcccacatgacatcagtgcccaaccactcccagactgacagatgacatccccacacacccccacccgaacttgactgacaggtgatgtccccacagactcaccccatccccacctgacaggtgatgtcccccaaagacacccacctccacctgacaggtgacatccccacagatgcccacccccacctgattgacaggtgacatctccacagactcccccatccccacctgactgacgagtgacttccctaaagacacccaccccacctgactgacaagtgacatccccacagacgccttccccccacctgattaacagatgatgtccccacttacgcccaccccatcccacctgaccgacaggtgacatcttcacagactcccaccccaggctgcgtcctgcgtggacctgggagatcgcaggtcttcatggcctccaggtaacgcagcagccctgagacttcaccttgtccccccaccagtaggggattccaggtcacagctctgcatggcgacccacagaggcctcgttgtcgtaggacacgatcacctgcttgcctggggcctacagctgcctcagcatagggatgtccttcgtgacaggggccacttgaggcttcggaccaggtggcgccgggtccacacccatcctcatcccgcacagacacagaatgcccccaaagatgttcttgatgcagcccacgaggtatttgtacaactcgcatccccttgaaattctttcaggccaggatgacgacctcacaggggtgcgactccagccactcagagatctctgtgagggtgtcctggagactttacggggatgcgtctcagagcctggcggactgggatccctttccacctagtccctcccatcccccgccctgtcccaattgagctcagacttcatgtggctggcttttgcttggaaaatgcttgttacacgacattgtgttcaaattttgtattcaagacatcgataagtatataactaaaaacattgcacatcatccctgccatcacgaagaagagtgctggtatctcttattaaaggcgaagcatggaaaccaaggtaccaaaactgtatttctgatgaagacataatatatagtctccagctaggaacacgttcttagccagattccctgtgttcctggctgtggtggcaaatgctttcaggactgtcttcaagcctgtcactgaaacttgcaggtttagcaaaggacaacatggggtggcagttggtggagttcagctacacatactttcgaaagatcattacagctgggctggtcgttgattgggatgttctccaggaaaaggggcccgcggagggtcatgggatcttcacctgagtttctagtcactgctccccacaggtcatatgcaattttacctatggcctgagagaggagctagagtacacagctggaagaaactggtagaggggctccacatacacggccatggggaagccattatccacgctggcttcaaactagtggcttctttggggtcacccacgctcctgccctcatccacgatctgtaaataaccctgataaactcattggttctgagggatgaactttgatgtaatcgatttttggtttgtcattgacactttatgaggcgaggaggtagaccttgacaaaccgacttacaacggggcagcttcttatatggtatataagatctggagccatatatcactgccagaaccctattatctaatgactaaagagaaaaggcagcaatcccttgattgttttgtgcctcatattcccggagattattgtactggaattgggaagactccagagacggaaataccaataaaacatactcctgctgaaacccgggatcgaaccagggacctttagatcttcagtctaacgctctcccaactgagctatttcagcaaatgcacaggcagccctgtacctggtccaagggaaatttaaaggaaaaagaaaaaactcagatgacttcacctctaacttttgattttctaatttcacttttagaggtgtatggtttctacttctaccgttttgagaacaatgagaaaattaattcctaccagggcgggttctgctgcgtccccggttaccatcgcatttaattcataagatttctctatcgctgtccagggtcccaaagagatagggattacctggtgtatatagtatggcctgaggatcccattcaaccctcaggtctgctggaaggtctacgccatcataattcttaaatggggtaaccagtttgtcctcagtcatccagctctgtccgaggcctgaaaggtcagggtcgagacagacttcagtgtttagtctgtcgccctttggcgaagggcgcatgcaaatcatagctgaaagcaggcagcaggagggtaagaaggaagcagtcagtgttctgcaccagcctggcctgagaaggatgggagcgaagagtggagaattacagttgcccagtggacaagtttgcactttccaatggtgtccccgagaaagaggagtctgggtatttgctgcaggcacttgctgtttctctccttaggatgccttctcagtctcaagattcacgatcctctatgatggctttgttgtagactattaaagatgtgttacgtttgtttatgctgtggaacatttgtcttaatgatgcaaagatgtgttgcattcttgtttatttgtttaactctgtgaagctgtgttactttgcctgtctaaaacacctgatggtccgataaaagagctgaacaatggctaggcaggagtgaggataggtggggctgacaggcagagagaataaatagaaggagaaatcaggaaaaagcaagagagatcaaggagtgagaaaagaaggggtcagccacccagccacccagccacccagccacccagccccagcccagccacccagccacccagccacccagccacccagtcacccagccacccagccacccagccacccagccagtaagagtgaaaataagatatacagaagaaaaggaaaaagcccagaggtaaaaaaaaaaagtagatgggataatttaagataatttaagaaaagctggctagaaacaagccatactaaggccaggcattcttaaataagaataagcctccatgtgtgtgatttatttgggagctaggtattgcccccccccaaaagagccaaagagtaaaaagcaatgagcagactttgtataaattttgttggatatgtgctttgtcaacttcatacatatgtgaactgtgttctgatttcctgtaacccctaccctggcagccctactattagcctctcgtccacattcatgttttctggatttgtttgtctgttgttttgtgtttgggttgggtttcagtttttgaaacctactgactctgtgtgaccatggatatggaacaatccttcacagattagtgggcgccttggtgggtacacaactaaagataatgaatgccccagaatccggatgatggtgatttttccaaaagctgaatctcaccctgctgtccacttttctttggatgtgtgaccactgctgttcctttaacaaacaccaaccaagccccacggctatgggcctacaattgtaggtgtattgtgtacatgttttttttttttttttaaacgttccttacccgtttcaacacacgttttcttatttcatcaccagattaaaagctcttagtaattatcacatacacctgcttgcctttagactctactaagcctgtgagtgagtgcattctcgtttaatcatcacaggtttatgatatggaaaccaagataatgattcttttacttctgagaaggctgcttttagagaggaagaggaggtcgtcttgaagtctttgtggcccctgcgtgaaacgtcgttgtgaggagggtgaagaccctgcttcacattcgagttccacctccatttttgccctttcttgctcatcagggcattctaggcttttcgagggcggatgacttactctggtttaactcctcatccagttgaggaggtctgcttcattctgtgacccgcctgaatcaaggaagactcaatctgtgtcaagcaaggagtgtcttctcctcccagggaacttgcttcacctcggggaacttgcacccgaactttttgtgtttaccagccaatttcttaaaatcctgcaagaataaggatgggagtgtacgaatttgtcgtgggtgtgcgctgactgttttggtttgtcccagcccttgaatgaacattctccaatacgaggcccacttttctcccactaacaggcatctctacctcggcttcaatatctcgcggtaatcacgggcacacttcggagaaggggaaatttgacctggtgtatagaggggtttcggttcccagaaaaaaacacctgttcctgacagcagggtaggaccgtgcagggaaacccgagccggccgctcttggggcagagggaatgcggttgcaagcatgtctctcgaactttcgagctccttcccagtaaaccatcaggaacgtggtgtgctcgccaggattttaacattcctttccccaaatgagatgtctaatgtcctaaaacgaatactctgagtaccttctttaaaataaaaggtttccgcccgaacagggacttgaaccctggaccctcagattaaaagtctgatgctctaccgactgagctatccgggctcacaagacagagagtcaattcgatatatgaagactcttaccactttttctgagctacactattttatagttactgcgccctttctttgtgtctcatacaatctctgggcacaaatcacgtgagagcgaggaaaggaaaacggatcatgaagtggaatgatgctattgcttaccatctgaacacagatatcttttaacaaacacgccccttttcacttagagcttaattcccttaaccgtgaacacctagttctgcaaaagtgtgtggtgcgggcagatgccacccgctaacaattgccacacttggtgttttcttccccagatcgaaaaggctgaagccagttgttactgccatcgggctgccctttcttccaatacacgactttcaattccctcctccccatcatgggtgcccagctcaaaaaatgcaagcacgaaacacagtagccgaagggagctgccctggtataccaggagtcagagtaagccctcccaacctgcctccgtcccagggccggccttcagctcgctcagctccaaacaccccatcctctctgataccacagaatcttatttttatagcagatcctgccacaacctttcagtcctctgggcctctgctggtagttgctcttccctcgcacctcccctttctgaacaatccctgttatgcggcgttctcagatgacgctctaaaggaaaaaaacaagagaaaaataagcaacccgtgcatttcagagagactcgaaagggattctcagggaaggggtgattcttcaagaagtggcccaaagttccagtttatatagcaccttcaacaagaaaaactaataataataataattaataactaataataataataataaatattttcggatgaatggcaagataaaggaaaaagaccttgtgtctctagagaaacaaattgtggggaagtaaatatataggaaattaacagtagataaagatagttaaggaagtctgctgtgtaaattattctgataccatctgcaaggatactaattttaaaatatttttagttgaccaacctttgtccttctagataaagaggagagaagggaaaggtttgtacatgtatgccctgcttgcatgcaattagagaaaaggttgagtttttcattgtattggcttcttaatttactatgactcaaacttgaagccaaagagatatgttggcctgggcatggtctcctccctgttagacactggggaatgtagttgaaatgccaccttctcttgggtgccctgtgtaaccagctggcacagcggcatcctgcagagtgggtggataaaggcatctgaagtatgctttgtaagttgagtgagattattcagctgtcttctttacatttcctgcttggatcacaagtgcttctcgcggtgtcctccctccactcctggctgaaacctggacagggcaaaagggcaacagttcctagacatgtgtgattctccttttcattaaagatcctaactgtccccttacctgtgtagaagagatgctgaagcaagctgccaggtggctccagagaaacagaactgattggacacagttagaggcagaggtattttaagaacttagttcaaactgttatgagagtcttaagttcaaaacctgtagaggcccaaacttccccagtggttctagctcctgatgctagcagacctgggctacgctcagctaggcgttggtcagagacgcttcccttagcagtagacagcagtcgatggggagatgcagaaatggtcacagcttgaagatagagattgtgactgctaaacaggacatctacgccaatccccgccaccaccatcgccaccaccaccaatgcttagagcacattgcaaaagagataaaaagaatttaagagtctgaggatgaggaggtgtgctgtgggatgccaacttttgaacctgacctggctatcaagctcatgaattactgcagcaggggttacctactcaagacctgcacaaaacaagccagcccaaatcccttcattgatagctagatgatgcccaggccccacaccatactgaagttattgcagtgagtatttgctggaggagggagaatcaaacttcattgagggtgtgaccactgggaggtttcccatgctccagtgtgtggcccccacacccatgctcatcacccactggacttagtgggaaagaaaaagacaggaagaaaagaaagaagagaaaagttgggaggggtgtggaggggatatgaatggagttggaaggagaatgtgaaaaaatagatatgattttatgtcattgtatacgtatatgctatgctcaaaaattaaaaaaatttaaaaacctgtagggcaggctgacagaccaaatatctgtgagagctttgatgtgctgaagctgtctcaattccaaatgaacacagcaggcagtcagccagaaattcaggcaggtattctacgtccacattttttgaattcctttctcattagaaattcatctttgtgagtgccaggataggctccaaagctacacagagaaaccctgtctcgaaaaaaaaaaaaaaaaaaagaaattcatctttgctcttaagggtttcaaatgattgcacggagcaaactacattatggagaataattggtcttgcttaaagtctactgatttgaatattacttatggcttttatttttatttatttttggtttttggaggcagggtttctctgttttggagcctgtcctggaactcgctctatagaccaggctggcctcgaactcacaaaaatcctagttctgggattaaaggcatgtgccaccaatgccggactagcttttattttattttttttaagttgcatttatctatgtatttgggggaggcatgcacacttaccgcagtgcctatgggaaggtcagaggactattttcaggaatcagttctgtccttccaccaagtggatcctgggaaatgaattcagatcgtcaggcttggccacagcaccttcatacatacatacatacatacatacatacatacatacatacatacatacatacacacacactcaacaataacatctaaattggtgtttaaaacaaataaccaagcactgttgtccaacttgaaacacaaaattactcatagctcatgtcacagccatcattcaaaggtggaacaatccagttttttagatgaccattttggtttgctctggtcataattagagattcaagagtctctgagcaaaacacatctttcctcccaagaacataatgatttggtgggtgaagccccgtatcatctaacctcttggcaattaacagaagagcaagcgttagtttgcagaaagttgctgggtttgttgttgttagtggtggttttaccatagtgtgtggtcttagactgtgagacttggatctcactcttttctgcccaaggttcagcctggcacctggctacacagacggctctatttttcccacggaacattgctccattgcattctccaatggttggctcatcaccctagcacgttttgggtttgtttgttggtttgtattagaatctagaattcagcccacagctttcagaatctccggaggcctgggcacctgtggggcatgtggggaggggaaggtgtttggaggtgtgaaccaatcagctcaaagatgcagatgtacttgtaaaacctgtgaagcagtgaggctcagtatagttctccctcttaaaatcagtcatcttgagtgcttggagtctgggaacctctgctgggacacaaagtgaatgagcattgaagtcggagggcaggaggctatataatagtggctttcaatgtagcaaatgaaaatacggtgcattcagttatacccgaattccacgtaaacaacgacttttactttgtatgcttcgtgcaaaatttgggacagtggttattctacagggttgtgtctctgaaattcacatttatttaggtgtgctgtatttggcctgataacgctagtgtagacctgagctggaaaaggattccttcattccccgcactccatccaaaccagctgtctgcaggtcttggttatttttacccaaggtggacaaacccggtgctaggctgagacctgggtttcagaaccctccggctgtaaggatccagctcagccacaccccacacccagcaggatccggagccccaaatctcccagctggcaggcaccacaccaccgtgatataggaaatccgaaagaatggtgtgaggtcatcaagaagcgaagggcgctcagttgagtacaagacagggaacactaactctataatatacaaaagtgaagacaggaacacaagatgagggaataagggacacaaatgacctcagagagggagcaaattaatcactagagttttgctaaatgtgagtgctagtccaggtggtgcctagtaaaaccactgccgaaacccgggattgaaccagggacctttagatcttcagtctaacgctctcccaactgagctatttcggctgtgcttgtgagcaccttttaacctctgtaattataacgaagaaataccgttttgtgccactaaatcaggtaagtttggctaaaggttagatgttcacaaatgttacaaagacgatgacgtaaaagctaggtttactatctgggatcgattacatctcaagcgactttttaagaaattgctctgcaattcacttctctgcattaaaagtacttggttggttgtggttgtgattgttgtggatgttgatgttttgagactgggtttctctatggagccctggctgtcctggaactcgctctttggaccaggctaatgattatttcgttgttgttgttgttgttgttgttgttgttaaattcaaagaatattttaaagtaatgaggattgaacctagggcctcatgcatgctagctggtgctataacattgagctacagccccaatccaattcataaaattttgaaattataactcataatagttacaattgcatgatttattaatgcacagcattggctatatgggtcaaacacaagctaattggatcacccatctcccagatttcatgatgtaaaacaacattgcaatgggtatatacacataaactaatattttgaggcaaacaaattttataaggtcaagacataacctttattttcatttagttttgttttgtgagaggcaaagttacatttaaagttttaatcactatgcctaagagatcaatgaaacaaaaatgcctctgttcttcaagctccttgctcaaggacagatagttcctgaaatgcttgaagcttttgtttatgggagataacaagccacatgttttcactcccctaaacaaatttgtttgacccatttgcactggatgtgcctgatcacatgtgggcgggaggttcactgggaggaactatgtcaggattatgtgtaggctggaggtacatcaggatatgtgcttgcctctgatgaaaaatggttttccttcttaagccgctgcaaactatgatgctgaggcatttcccaggaatctgggtatggacctgactagagcccatccacctggccagtatttaattaaagcttgcttcaaatttggcttttaagtgtagtagtggatcttattctcaattggcgggattaacaatttccctttttgggtttttgctttgcttttatagatgccatcaatttgaatgtcagaaatatttacaaaacgtctgggaaaaggatggcaagaccaagaatgtgagctatcccgagtttgattccccataatcacacacacacacacacacacacacacacacacacacacaccgtcgacatttgcaaacccttcacacaatgtagactttccatgttacctcaataggagttgtagatacttgagaaattgacttggctctggcccctttcaaactttaagaagtcagttatggattaatgttatacctgagatgctggttctgtcccacctgtctcccattctagctgtacattccttgcatgtgtttaatttaaaactatatttttttttcctttggtttttctctgtaactttggaggctgttctggaactcgagctgtagcccaggctgcctcaaactcacagaaatctgctggtctctgcctcccaagtgctgggattaaaggcatgcgccacaaccgcctgtctaaaagtatcttaagtaccataaggctagttaaaataatccgatgtttcatactaagttgattcatgagaagggggaacatgggcttattgtcacttgaaatgaaaagatgatcttggtttaggatttgcaaagacaaagtagtgaatgattccagattgcctttttcaagggaatgagggaagagcacatccatggtacggagctgccatgcctcaactagatgttgtcaaggtttttacagacccaatatcaccattttgatttttctaggtagttgctgtaggaaaaaaaatcctaaaataatgcccatctaaccaaccctccagacacctgttgtaatgtaaaaagcggctcgagagagtaagacaccatgtgacagagttcatgtgaaggggtttttaattagggaaacgggaaaaagaaggaggggagtgggggagaccagcctccagggacaggagcagcagaaaaaagagaggtgtgtgtgtgtgggggatagataggcagaaaagcagagagagagagagaggaacagagagagagacaggaggtgggcagggcccttttaaaaaggaatgtagtgaatgtgcacagatagtgcttagcagctgcaactcagaacatgtcctgtcagaaccccaagggcaggccagatgcccgaatactactaccaccaccatcaccagcagcagcagcagcagcagcagcaaagaaagctacacaatcaatatgatagggtttgtcttttatggttacaatagcctacacagcacaactgactctagaatattatctattagtcatagagggttttgtgatggttatcttgatgatcagcttacttccatggagagatgcctacagggttagtaagcacgcttctgagcagtccatgaggctgtttctagaagggaagagatcatggaggctttgacctaatcactcgtttaagcaattgaaagattcaatatttaaattggtaattatgtggtggtaaattaaggaagttgttcctatttggaagaagtgggtcacttggggtagacgacaagggacatatcttagcgctggtcctttctgtaactccgatacacttcctggttaccttgctctataatattcctttggaggtgatgttctgcctagcatctgacccaaggccaagaaaccagctaagcatggactaaagccatggaccaaaaggaacccttcttccccttactgtttctctctaggatttgtcacagcaataggatgtgtggccagcatggggtccttcagctgttcacagaagagactcgagttaaacacataagaagggtataaagttccctgggcttgaagctagagaccacatggtaaggcccacacatagccccaggaataagactggctcctagctgacaatcaacaaagaaactggttcttttccacaacaagaaactgaaggctgccaccaaggataagtctagaaggagacttccacgatgtgccttctgacaagagctcaaccatgtcccctttatgtctcatgagaccctaaacaaagaatccaaccatgtggtgtgactccttacctccagcattgagcttataaacaggcctggctttaagccaccaggcatatggtaattgggtatgaagcagtggaaaaccctttcagttgtatagacttggtgtatgcatgacataaggtgacttaaatcctggccaagtgcttgtctgggattcagagcaagtcagtcccttcatagtcatattttagatataatggcactaactatatagtacaattattatatatataatatactagcctaacctcagttcctcagttgaatccaaatctttgcagatatatacatacaatatgtattattgtatccttggttatccttggctatagtaaatttagactatgtagaaaattggaggctagggctggagagatggctcagaggttaagagcactgactgttcttccagaggttctgagttcaattcccagcaaccacatggtggctcagaaccatctgttatgagatctggtgccctcttctggtgtgtggaagcagactgttgtatatataataaataaataaaatcttttaaaaaaataaaaaaaagaaaagaaaatcagaggctagtctaggccacagtagaccttgtctgaaaaaaaaattgatatctctacaagtccctccaacaaagcatatacaaaaatgagttgtttctctttcaaagtcctttcttcctttaaaaaattattttatgtgcattggtgtcttgcctgtatgtatgtatatgtgacatacatacagatcccctggaactggagttactggaagccatgagctgccatgtgggtgttaggaaccaatccctagacccctggaagagcagacagtgctcttaactgagccattgctccaacccccttcttttttattttattttagaattccagctagcctggaactcactctatatagaccaggctggccttgaacaactgatcctcttatctttgccctcctagtgctaagattaaggctgtgagttgcaatgtcccaaattattttatttcagttatgtatacatgtttgtagttgtgtacagatgtgttcatgcaagggcaggtgcctctagagatcagaaagcatcagatccactgatcaggagtctaggcagagatgagctaggaatggaattctggtcccctgcaacagcagtacagacttttcaaccactgagctgtttctccaatctcgaaattcatattaccatttgtctcagttagggttgctattactgtgttgagacatcatgactaaaagcaagttgtagaggaaagggtttgtttggcttacacttcaacattgcactcgatcattaaaggaaggaagttagaaaggaactcaaacagggcaggaaccagaaggcagaagctgatgtagaggccatggaggggtgctgcttactggcttgctcctcatggcttgcttagcttgctttcttatagaacccagaaccaccagcccagggatgatcccacccacaatgagctgggccctcctccatcaattactaattaagaaaatgccttacagatggatctgatggaggcattttctcaactgaagttccctcctttcagatggctttagtttgtgtgtcaagtggacataaaactagccaggacacctgatttctcatctaagattcccagggcagtgaattgcaaaaccttcccttctctgcctcctgctcatcatcccacacgctgtacatcccacttagaattctcctgctgcccatctttcctctccagcttcttaacaggtcttattcataaattgttttctacctgaaacccaataccctgcttttcactagttaaaaataaaagccaaggcttcttctgacagcacatgaagcattttggggggagagcacacacttctcctgcaccttgcttggtggttttgttttgttttttttttttaatgcttgaggacagttttactagagtttaagagaaacagtacaggttaactgagaataccagcagctgccacaaggagaagtatagggaaaagtcatgccttttaagataggcatggaaggcagggtgtggtggcatacacctttggtcccagcatttgggaggtagaagcagaaggatctctgaatttgaggccatcttggtctacaaagagctccagtatagtcagggctacatggggagatgtctcaaaaaacaaacagctgtgaggcagaggcagacagatctctgtgagttcaaggccggccaggtctacagagtgagtttcaggataatcaggactgttatacagagaaaacttgtctcaaaaacaaaacaaaacaaacaaaaaaaacccaccagtttaaaagtaaaagctagacatggtatagaaatagaggtagcttattaggaaaggaaaatgcactcccagggatggaagtgggatagtgagctgagcaaagagccctcaaggctagtaaattcttgatcttaaactggcatgcatacaatccctgccagcatgtttgtttgggccttgctctttctctttgtctacgaaatacatttatataacccttcccttaatgcctacttaacttgcaactcacagctcaagttcttctagttctagaaaccttctttgacatgcctctatccactttcttccaactccctacaggctacagagcctcacaccactggccaaacttgattacaattggctgtttagttaatctttttttttttttttcctatttgtgttagttatcagttagataacaggctggggtaaaaacacagaaaacatgggtgagtgagtgaatgaatgagtgaatgaatgactaaaaacattcctagccatatcctaaaatgaacttgtttttagtaacccttaaatcacctggtcaatagctgggcgttggtagtgcacgcctttaatcccagcactcgtgaggcagaggcaggcggatctctgtgagttcgagaccaacctggtctacaagagctagttccaggacagcctccaaagccaaagagaaaccctgtctcgaaaaaccaaaaaaaaaaaaaaaaaaaaaaaaaaaaggcctggtcaagctcagaggcagtgacctctactggttatttatggaagatggagtcatgtgtcatggtgtagggagggacccaaccccaggccttgcacttacatactgcgtaatacccatagccctttgaagacccctcactgggccactcagctgccttcctgaatggaacaatgaaccagagtagcagcagtttgaaagagttgggggactatggctagctaccacaggtgctccagaaacccacacaaggctctggatgctttcactgggtaagggacaaaagctgtgtgctttttattatttatttatttaatgtttattatttggctgggtctcatgagacccaagctgacctcaaacttagtatgttgttaagaatgaacttgaactaccctcctaccaccatgtcccaatggcacatggagtgtctgaattttgtttcataaagtgtatatctgtaaaatgattgaaatctgaagattttctgtaccacttttgagactttattttactgaccctgtagagcaaatccttgaagtgtatgggttgaacaagtgtgtgtgtgtgtgtgtgtgtgtgtgaatgtgaatgcaatgacattttataaacaagggaagagaagcgcctaggtcatcatgtcaagactgtcctctctgctgcagtctgtagagattgagtctcctttgagatctggctaatgagggagtaaggatcttgaccttggcaccatgcatagtccttgtgggagaatccagtgtagtggagtgaagttcagcagtgtaagcttttctctgttcctttctttatcactaccagacagctccagctctatagcttgagagtcctcaaagactttctgtcctaattctttgaatgtgggaaacagtggttgtcgtcctcctccatatcatctcttctttcccttcaggatggatctcctctgttgcttttcaactgtgtagaaatgaaggctggggaaggcaaacataataaatgcccaaatcattctaacttgcctaaaacagcatggtgaaccatctctgtgatcaaagcctgtatttctgcttgtaggactttaaaggtccatgaatgcatgggtttgaaatactgctgagtcataaggttgaatcacgttggactatgacgcttgggatccacatcctaactcgtcatgtcacattattagatcaaagagggacaattacacactgtggctgcttgattgtccctaatgtaggaattagattatataatggtgctccagatcttggcacagggctgttaggccttgtacctactggcatggttttcaccttaccagaaaacaaaataataaaactttatagcaatttaacattcaattttgtaatagtaatcaggcaaattgaacagataggtggtttctcaaaaaatctggtacaaaaacaatccatgacaacacagctacttttgttgacatgaatctgaaaaatccagaatcctggaggttgaatttctaggatgttccttggggtagagccttaaaagaaatggcactagtcttatgagcctgtacagatagccaagcacttcagtggcagtatgtgacacggccacaaagggtcacatgagaagactaaatcacttctaaaccagttactccttgggcaaagaatagctgatagaggccatagccactcccagctttgaattccaaccctgactaatcaatcatccatgtgagcctgaacaaatttagtttttctgagtgcctttttttcccccaccgtcagcatgatctgaatagtttcctcttaaaagttatgtgacccagagaatgagttcctctcagctctctgtacttagggctcctcctgggcaggatcctttgctgcattctctaacaggaactctttctcagcccataccctacaatgctcatcctcttctagcgcctggactttgcaaaagaaaaagtgaaatgttgtcattgcttggaaatggtctttttgcttttgaggcaggacctaagtgtctcgggttgctctataatcttcctgcctctcctgcttttgcctacaccaccactcctggccttctatttgtttgagttagactctccacaagtcacccagacttgagctcctgggcttgggaaatttgcctcagctgattgctggaagacaagtgtgccacttcattttgaaggtctttcaaacaaagtacaattgcttatggttccaaaggctggatttaaacctatacatcaaatggctaaaaattttgagaattttacttttcagggctgggcattaaatccaggccaggcagggacatgctaggtaagccctacccataaactatatatagttatgtttctctatgctcagacattaacaaatgtcacactgcaaggttattctgctcacaaacttggactgatgttgaagaattacaatctaagagcttgagagatggctcagctgttaagagcacttactgtgccaggtgttggtggcgcatgcctttaatctcagcactcgggaggcagagacaggcggatctctgagtttgaggccagcctagtcttcagagcgagtgccaggataggctccaaagctacacagagaaaccctgtcttgaaaaacaaaaaacaaaacaaaacaacaaacaaacaaaaagagcacttactgctcttgcaagaggcctcagtttggttcccagattctacatggtggttaccaacctttccacacattcttctggcctttgtggccaccagacatgcacatagcacacatacatacacataggcaaaactcatacatataaaataaaattcccaaacagaaaattaccactgaccaggtctccctctgtccaccactattttttgcctagtaggagtagaagcaaatcagacaatatagctttttaaaaattatttaatttagtagttttttttttgaaaaaaagcaataaggcaaaaaaactgaaaatatatatatatagtcttgttttgctttcatgtgactttattccatcttcaggacttctaagcttcttccgttagcagggatctgggaatcaagctagaaatgtagtgcagatacagaggaaggggctaaagcaataagattctgtgggaaatttccgttctatccaaagtctccagagatggtgcccatttcatgggcctcctggagtaaccccttgtactgggggaaagccttcttaggaggaaattccccagtgctcaatctttgaacatgtttgatctagggagggagagatggtggggggaggggaggatatgactaaaagtactaatttacccagtaaaatccaatttccctggagggataacttcttctggaatgatattttccccaaggacccacactggctgaggctcaatagttaaggaacaaaaacaaaaacaataacaaaaagtacataaggaaggcacctcaatttatgaccctcaaccaagggtggattgcacaagggttacatttctgaataggaaactgaaattaatacagaaaaaatgatgaaaggaagccagggcccagcagttcccacagggcacagggctcttagctcacattcttggaagaaaactcttttgggatttagcctgagctggctgggacagaaggaagctagaaatcaccctcctgactttctacccgtactcctcctaaggaaggaaactgaggtgggaaaaagactaggacttcctttccaagagccaggtaatcaggaaagcagagctgaggcagcagtgggtcaccgtgacacaaaccttcatccttgtccctgttcagtaactgccacatgtgaccctgcttggggttgcaatgccctcaaagatggaaagcagaggggcatcaacccatagtaacatgcgtccgagagtcccagggagacaggtgatataaaaaaaaaccaagagtcttcatgggaaagaggaaaacaaaaaaaattagatttttctctacatacatatatatatatgtatatatatatatataatatacagatgatttaacacattattccagaggtggctccattccatgggactttcaagatgatgaaaatgtgtgttgcagagaaacttctctcagattctgaagtatatagaacaggtcaggcaatgtttggctccagactgtgacacaaattcaaactggtaatgtgccaggagagaagccagaaaggcaatgaaagacgggataggaaggactgggaaggtacaagtggctagcagtcttcttccaacctgcctgtgttctcagaggttctccacctgaggaagaccataaaacccctttataaagatagcgtggccctcttatcaactaccaaagaggcctctggttgctgtcaaagtagatagaaaacagcagaggggtgttgtatgcaagtgaagataaaatctccaagaacataactcagaactccagccctagagaacaatctctccggcagatgctccaaaacctttgttatctatatacgacgcctcattaaaccaaccccacgtgtgagtacatttcctaacatgagacctgtgcatgaggcctctgctggttaagtcttgtgtttctttttaaggaactttaaaatcagttcttgctttgaacagcaccaaaatgctcatgaatcacaatcttacgcagatcttggctgagcaggacactacaagggaagagtgaacgacatcatcttacatgggggcagagaaaagaccacgaacacttacttgcctttgcagatgtagggtaacactaactttcagccactaaaccgctcccttacaaacatgggtatctactacgtcgatttcagcgtcaatcagctaaggcaaccagccaatcaccaccacgggtgtctgcttctggtgattgatttggaaaaagtgattggttaagacagacaaatttgaggaaagcacttggtaagagtcccactgccagccttcccgcacatcctctgccgtcttctccgatccaccctcttcctttgagttacagccgcttcagaaaatgtctgggcaagagccccagtcctgcttttccttacattcccagtattcccccctataaacatgggttagctccttggtgacagggtccttcttccgctcaaaccacagtgccttataggggtcatatggtgtgcctaaaagggaagaaaatgaaaagctaggttagagctggcactcgccacgcaccaagaaatcacaacaggggacaggtttgttaccatcttccgtggctttcatagcttctgcttctctttttttcctggaaagtctctgtttttcctctaggcgctgcttctcagcatttgcttcatcccagcgcccattttccatcagtctctggtcaggccgcaaccggctgtctgtgggtgcagtgcccccttcccaggcgttgagagtgagggcgagctctgagaagtagtacatgttttctgcattcttcctaagataaccaagacaaaggaaaaggcagtgctacagtctcaacccagcccaaagagcaacagcttgcaatactgccttgcatctaagtgtcctacaaggggaaaaaaatccaaaagccttatcaggtaaccccaaactgcaccgctcccaaccttccccagcatcacttcacccaacagttactgcaggatctgccctatattatctatatttatcaggaagaatgaaatcttcaaaatggcctatttcctatttcctttgcttccttttagacctctttctgggatgatctggctatttctaaagacacaatatataagatgatgacaggagacaaatggcctgcacctgttggcaaagtcctgcgtgttagcaggtagaaagcaccattctcccctggctgcttttgtaaagttctgctctgaatcacagtgagaatgcaaagggcatggtggtgaatgcctataaccccgctcttgggaggtacaggtagggatcagatcaggacttcaaagagagcctgagttatacagtgagaccagcctggactacatgagaccctgtctcagaacagaatgctaaattatataaagagattcttcagtggactttagagaggagaaatacaatttggcatatgtttggtggggtacagtctaagaacaaagcacacttcaattctaatcatgtgtacaatttctggtaatctctgtaaggttctgacctcccacagataaccatgaagaaagcaggcagaacacctgcatactgctcccaggaggcttgcatgccatactcacggtaaaggattcctcttccacagcatgaccctactttcttctgcttcgtggcctctctgacgagcatcacccccattttccccagaggctggttgaactttgaaacaatccattttctcatcccatgttcccaggagggcaaagtgaacttttcctgatgggtctgtcacttcccctgtcacctacaagggtggagagcacagctttggagcagaatgaccactgtggggtggcttacctgactaatttagaaaaagtcccagggtaagtcctggctaaatccagtggtaaacattatggagctagccatgctttctttctttcctttttaaagaaaaatatttaacaagcttgcttcacatgtcaatccaagctcccctctccctccacttctcccctgtccccaaccagacgctcctaagtcccccactctcccactgcccctcacggagggtgaggccctccatggagggatctccaaagtctgtcatatcatcccaggcagggcctaggccctcccccatgtgtccagactgagagagcatccctctgtgtggaatgggctcccaaagtccatttgtgtgccagggataaatactggtctactaccatagattgccaaggcctcctcactgacacccaagccaagttttcttgttgctgatttttaaatactacttgaaacaaaagtcataaattgatgggttttatgatcaaagcttcttactgcacagggattcctgacacaaggatgtaagaaggaaaagtacctggctgacacttttaaaactactctagaaattacacagatccacaaacacatttgaatccccaaaaaaataaaaataaaattttattttatttttttgttttttcgagacagggtttctctgtgtagctttggagcctatcctggcactggcactggctctggagaccaggctggcctcaaactcacagagatccacctgcctctgcctcccaagtgctgagattaaaggccaccaacgccctgcattttttccccccatttttcgaaacagagtttctttgtgtaaccctggctgtcctagaatttactctgaagaccaggttgtcctcaaaactcagggatcctacctctgccttctgagtgctacaattaaaggtatgcacccccactcccggctagtcttcatttctacatgaaaatctgaatgtgtggcatgatcaccctgtggcagtaatagacatctctccttgcatgccacagtgatcctactttctgtaccttctccctttcctccatgttcccacaatcactctatgactggtctttatttatttatttttaaagatttatttatttattatgtatacagtgttctgtctgcatgtgtccttgcagactcaaagagggcaccagatctcattatggatggttgtgagccatcatgtgtttgctgggaattgaactcaggacctctggaagagcagccggcgctcttaacctctgagccatctccagcccccgactggtctttatttttaaaataaatttatttttatttaggggtgcgtgtgtgtgtgtgtgtgtgtgtgtgtgtgtgtgtgtgtgtgtgtgtgtgtgccacatgtacacaggtgcatttggagttctgaagaaggtgtatgataccctagggctagagttccaagtatttgtgaacataccagttgatatgggaattcaactcaggttcacttcatcattgctgttcaggagaaaaaattgatgcagcaatgaatttggtcccttttctggttttcttctttgcatctacttttctgatatttaggatatgtgtctttctacctacctacctacctctatatacatgcacacacaccagcacttctaagggatgcacactaaatgaaaaatatttacatctcaaccactcttacctttcttgctacatcccgagagaagtagctataaggaacaaatttaagattacacttgtctcctgtcttgtgatttacgatgtcaatctcaccagactataaagtgaaaagaatcatgaattagttttatgaaggctgacatgaattttacatatgagtgctcccttgtttaaagaacaagtcctagccagacctggggcactatggaacccctctgacaataatggtatttctggttggaattaaggtcagtctttctttctttctttcttttttttttttttggttttttgagacagggtttctctgtggctttggaggctgtcctggaactcactcagtagaccagactggccttgaactcacagagatccatttgcctctgcctcctgagttctgggattaaaggcatgcaccaccaccgcccggctagtaatttctttatatgtgtcacatgttggtaacatgacctgaccttcagtacatgtagtaaaatgcacatgtaataatctacccttctaagcaggtccctcattaggacctttctagaattcctttgcttaacacaaattacagtttcaaagttctatagatcttcccatagactttggtttatttttctctcctttctgtcttttaaagactcagcctaattccacatctatcacggaatatatatcttcatcagaaggcagtattacctcttttctgactgtagctaaacctgtcttagcccaaagctaacacttaactagctagtctcttagcttattcctgtactataggctattttgttacatacttttcaacctacacaagtcatatttcttcaatgatacaataatccctggagggccttctctgattttgtaacaataatacctagggcactgcttggcaataaacacttcatgattagcaaaaacattaagagttgggcccatctaactatgtcttatatcccttttattgcccaacagagtcccagtagtcattgacggaacttataatttggtcattcataagtaataatgtgaatatagaattatatggacgtaggactactgcttgagagaaaatccttaggagaaactagtgatccagtaaaaacagtctgggaccagttactggatactaaatacaaccaacattatctgaagaggtgccctgaagttcagaggcacttatggtacctttgctcacctgatctatccacagcttgcccacaataatgttgtgtactgttgtggtaacttttttccaagtgtaatggtgcccagttgcatggaaaatgcagtggatggtacctagaaacaaaagtgtacagccaggtatcaggaaaacagcatcatgcacactagaaataagactgatttccattagcatttcttactttaaaaaagaaaacagcaattaaaaaagtaataaaagcataactttcttaatgtattggattacttgattttaagtatatgaatatgattaggtgatgtcagataacaacaactgaggcatcttagctaaggaattgtattttataataccaaatttaaaatttacagaaacaagacaaatgtgtctcatcatgaaaaaaacaaaacaaaaacataaaactgcattgagaaaggaatacatattggcagtcaggattagtaattagctggctgaccttaaacaaccacttatctatggattttaacagtaagagcaaagagagagattcagaactgaactggactcagtcctggcttttcactcactacatgtgcaatcctatgtaacataataatttttccgggtttgctatggttactggaagagaatcttttgactgctgtaatttctcaatagaaattatcttaggtgggtttgatactttatgctgctgaggttactcaggggtcactgacagttaatgttaatgaaacaattcaggatgagagcaagacaggctagaaagatcaactgtgttgttgacaatttgggctgagttacctattaccatacctactaatcttcaagaagggaagacagatattgaattaaatcttatggaattcaattaattaagctcacatagtgaacatctctggagtccaaatttcaagagtaacatgccctgattcctttgtaggaggtcatggaagtggtgcatgcagaccccaccttgcttcagcttcaaagtctcttcattcaactgaccctgatttgtacactaaatgacaatactgtatgcacaccactttcctgagttagttccacaagtcattccagtaagtttcaaaactaatgaggctgaagagatggctcagtggttaagagtacttttgcccttgcaggtgatccagtttggttcccaaaagctatatagtggctgacaaccatccaaagctctaattctagagaatatgtgtggcattctctatctgatctctgagggcactaggaacacacatggtacacatacacacatgcaggtaaaacacacacacaaataaatctagaattattttgtttttgtttttgcaattttcagacctgagggaacttgggtatcccttaaatttatagcttgttggtccaaagtatggggaatttagcaccccaaaatttgtggcttatatcagaagcaagggcaatgttgctggaaactgtgcccttaacatacagaatctgtaaatactgtgggtagtgtcaggattgtatttataatgaatattttatattttaacttcctttggcaggtttataatctatagacttgggacaccacaccctggtcaccagcaaatacttgtttgctcattaaggtgattgtaacattacaaggttacaagtaggtataggttcccaaatgaatgttaaatcaaaatctacagtacgagcagaggtatctgagaactcaaaatgtgtgtttgtatagttaagagcacttgctgttctttcttgcaaaggacctgaattctgctcccagaactcatgtcaggttctcacaactgccggcatctccagacccaggggactcttatggtctccagaagcatcaggacaccctaggcgcgcgcgcgcgcacgcgcacacacacacacacacacacacacacagataaaaagaaattttaaaggaaagaattcacgttaaattacaagggaatccaatcaaaacaattttgaaaatgaacaaactggaagatccacactttccgatttcaagcttattgcaaaatcatactaaccaaagcaatgtagcactggcataaaaacagcaggttattggacagatcaaaaagcccagagataacactttacatatgctctcaatgatttctgacaagggggccaagatcattcaataggaaaaggacagtcttttatttacatgcaaaatgattaccatatacacaaacattcatcccaaatgttaaaggttacacctcgatataaaactcagtaagtcaggcagtggtggcccacacctttaatcccagcagtcgggaggtaggggcaggtgaatctctgagttcaaagtcagcctaatctacagagcaagttctaagacagctagggctagggtctctgggagtgtggggaagtggggtggggaggagagaagatgggtggatgtgagagggaggactcaaaagaaatcaaaggtaaagaagtttcaagattatattagtatgacttttttttttttctgttttgatttttcgagatagggttttctgtgtatccctggctgtcctagaactcaaacatcctcctgcctctgactccctagcgctgggattaaaggcatgtatcaccactgcccagcagtaatgacttttgggaaatgacatcaaaagtataagcaacaataaaagcaaacacaaaaaatggacaaaatggtctttttgaaatttaaaaattttgtagatcaaagggcaaaacaatggagtaaaaacgcaactcacagaatggagtttttaatttggtttttgagacagggtttcttgtgtagatcacactgttctaggactcactctgtagatcaggttggccttgaactcagaaatcagcctgcctctacctctagagtgctgggattaaaggcgtgtgttaccactgcctggcttgtaaatcttaccccctcctttcccttccctctctccttcctttggataagggaataatatccagatcacatataaaattccttaaactaaacaaaacaatttaaaatctggcaaaaggggcatagtatggtggcacaatactatcccagtactcagaagacagttccataccaaccagagatatatagtgagaccctctctcaaaaacagataataataaaaaccattaaaaggcccaggcatagcggtgcacacctttgatctcagcatccagagggagaacatctcaataaggtccaggctagcctggctgcattttcagatccagacagccagagctacaaaatctcaaaacaacaacaaaaatcctaaaaacaactggcaaaagacttatagactgctctaaagtaaatacacaaatcattataaagcacacaaaaaacatactctacaccactgttaaatcaaaaacacatgagatatactttacaacaatcagtgtagatactattgaggaatgaatgaatgaatgaacaacaaggacatgggataactacagccttggtacaccatttggagggatataaaatgatagtcacactggaaaagtgtggaatttcttaaaacattagaaagagaattaccatccagcaattctactactggtgtatattcaaaagaatagaaagcaaggactcttagagatatttatactcagcttcacagaagaatttatatgcaatagttaaaacaaggaagcaacctataatcatcaacaggtagacagattaaaaagagagaaaaaaaaaaaaaaaaccagtgtgtatacgtgtacaatgtaatggcaatagtcattttaaaaagagaaatcctagccaggcattggtggtgcacgcctttaatcccagcactcgggaggcagaggcaggcagatctctgtgagttcgagaccagcctggtctccagagtgagtgccaggataggttccaaagctacacagagaaaccctgtctcgaaaaaccaaaaaaaaaaaaaaaaaaaaaaaaaaagaaaaaaaaaaaaaaaagaaatcctagccgggtggtagtggtgcacccttttaatcccagcactcgagaggcaggcagatcactgtgagtgcgaggccaccctggtctacagagtgagttccaggacagccagggctgttggggggtggggggggagaaaggagagagaaatcctaacattgaacacaggagaaaaagaccctgagatgaaataaaccagtaacaaaaagagaaatgcttttaagtcacagatctgtcagaactatacagacagaaagtggagcagtggtattctgagtctggagaaaggaccaaatgagcagttactatttactgggtggaaattatcagctgaacaaaatgaagcatcttggagtcagatggtgttcatataccattatgaatgtagtaaacagcactgaattacatacttaacatgtaaggaaaaaaacatgtaaggaatgcttatatatgtatgtgtataaaaaattacaataaaattttgagggaaaaagcacacatgaggccaaaagagagtagaataacatattcaagatgctgagaagactattaaaggaagacttctataaccagcaaaactatcctgcataaaattgagaacatgggaagaggggggaggaagctgcgagagtgagaagggaagaaaaggaaggatgcagaggtcatgaggaagcagaaattttgagtcaggtatagattacaagaaaggacatgtgataggcaggattttagttggggggcgtggtagaggagggagggagggagaaggtaactgggatcgtcatgtaattcaatcttgtttgtgattcaaatatataaaaagataaaaaatagaaacaaaaccaaaaaaactatcctgcataagcaagaactcaagagtcatccccagatcaataaaattgaaataatcagtcttctaagaaactctaaaaggacactagtggataactttaatccacattaagaaactaagagatgccaggcgttggtggcacatggtggcctttattcccagcactcaagatgcagagacaggcagatctctgtgagctccaggccagcctggtctacaaagtgaattccaggacagcctgggctgttatacagacaaaccctgtctagaaaaacaaaacaaaacaaaacaaaacaacaaaaacccaagaaattaagagaccagtgagtcagctatgtattatagtatataactttgttcttataaaatattcatgtaagtaaacaatataaagttatgtaatgagatttaaagcataaaaatacaatttccaggggctgcagaaatggctatgtggttaaatgctctttcagaggatctaagtttgattgccagcatgactatctggtagtttacaaatgtctctaacaccagctccagggcatttgacacctttggcttctgtgggaactgcattgaactcgtatgtacacattcacatgcaaaaccacacaaattaaaaatagtaaaaatagccgggcgttggtggcccacgcctttaatcccagcactcgggagacggaggaaggtggttctctgtgagttcgaggccagcctggtctccagagcgagtgccaggataggctacaaagctatacagagaaaccctgtcttgaaaaaaacaaaacaaaacaaaaaaccaaaagaacaaaacaaaacaaaaaaatagtaaaaataaatcttaacagggtttctctgtgcaatagccctggctgtcctggacttgctttgtagaccaggctggcctcgaactcagagatccacctaactctgcctccctagtgctgctagtgctgggattaaaggcatgtgccacctcacccagcaaaaataaatcttagaagaccacacacacacacacacacacacacacacacacacacacacacacacacacacacacacaccctctgcaagaaaatcagtgtaaagtgaggaatggtagcggctacaaagttcttgtgtgcttccaactctgcaagtcagggttcctactcctaggcttcatctttttgatcctaacacaaaaataatttgtaatccagtaaaataaagtttcatctacccaggattcagtcattatataaatgacacctaaaccatcaagcagagagaggaccataggggaaagattagccaagaaacctaatcttctatgtacagatggaactagagcaatgaggaaaccccattaaaaaacgttttaaaggcatgctagaatccatattctaaagtagcacttacaggcaaaaagtgaatatactaaagagacaaagaatttatgcaggatgggtctttaaaaagtacctgccctccttactcatttgatagttgggaagttaaatgattgctagctagtgatgttggtgcctgaatcagagctcccaatctcttgatgcctgaaacagtggtgtcttccattacgccagaacaccttcacaggaataaacatggtggccttaccgaggggcataatggagaggtatttgcctcgaaacttgctggtgattttgatttcctgacgcaatgtccagccatttttggattcagcatggtgcgcagcagcagggggatgatgactcaccttgaagaaacaaggtttaaattaagaaagaagaccagagaagagaaagatatggcctattagttggtggtaaacacccaaaagtcttctgtgatatttttacatccacaacagtgaatgacaggcctggtgtgttgaactctgatgaaaaagaagatagacccggctgattgtgactcgcttctcaaaaactatcccatcataaggaagggaaagtgttacaggcctgggctctttacctgctcacaaagggatcgatacccattctcctccaatcggtccagttcgaaggtctccccaagaagagggttgaatggcttgctggttcggaagacagtagtggaataggaggaaacggtgaaggctgcaacatagcagagctgttctagagagttctcacattttgcagctcgatctaatagctcatgatattccagatcttcagtaaggcgctgaagcatggacaagggctcattaaagtttacctgtaaggaaaagaacagatctaaagtctcttcccagacatttaaaggagacagctggagaaagacactgagatgctgaggtgataatgcaacggaagagaaaataagtcgtagctctcggattagttttcaggtgacccactctttgttaaagtccatgtcagtgagtggctttctgtcattttagtaactataagctctttgagatggaaatcatgtcttgtttatgcagcactgcagatccaacaacaggcagaagtgactgatcataggagacctcatcagacagtaactgagcaaattaaaggaacgaaaaatttcaaaagtgcacctagagaggaagttagatattgaacgttttggggggataaacaaaggggtggtaaattataagtataggagtgtcctgaccactgaaatgactgcattgccaaagtcagcttctaccctggactagtcacttgctgagtcttggtcaggagctgacttctgaggacagtgttgctagacacagactgctgctgctagggttcagaggaagcagggtatgctctcaattttcaaattttacagccgacttacagcacccaatcactagctgatgcaagtgtgtagagacgggtgcagggaatgaggaagcacttctgctaggggaaatgtgcacctactattcattacacaaacattatctgagtgctgtgggtgccagagcctaatcttcccacttagtgaagtgaacaatagacactgctcacactgcttctccttcaagaagataagctaatttctaaggtaactttgaaattttaaataattttgctaatttaacatttgttctgggtcaggcagtagtggcgcatgccttcaatcccactactcgggaggcagaggcaggtaaatctttgtgagttccaggccagcctggtctccagagcaagttccaggacaggctccaaaactacacagagaaacctggtctcaaaatacaacaacaacaaatttattctaaggccaggtatggtggcacatgcctttacctagcacacagagaggcagaggcaagtggatctctgagtctgatctacataatgagttccagaacagcaagagctactacataataggagacccacgtatcaaaacaataaacaaaatttgctctaggggctgggcttgatgggtaggagctcttactctgcaagcatgagtttgaatccccactacctacattaaaaaaagccaggcatggctgcacatgtttgtaaccccaacattggtggggggtgaggagggcataagtagagactggcacctcccaagagctcattggctcacaaccacctgtgatagtggggaatcacatgactctgtcctccagccacttcaactcaaagcccatattcacacacatatatgtaattaaataaaataaattgatgggtggtggtggcacacgcctttagtcccagcacttgggaggcagaggcaggtggatctctgtgaattcgaggccagcctctagtctacagatcgagttccagtcccccatcccctcctgtaacacttttgcctcagactccagagacacctacactataggagatgcctgaatgtggcatggtgaccagtgtaacccaaatccttactgcaacagaatctcttagtggcaacacttcagggagaatagagaaaaactttcacatgttcagaggaaaatcatgacaaactgtgtcctactggtggctaccagacacagaacagacctggaccagagtccaaacatcactagtctgtcatttacatataagccaccttctaataaatgttccaagaatctcagcttctctgaaagtgccaagctctttattatggtcattttattactcagaggccaagcacaaacaaatgggtgtgagtattttaagcagaaggaagcaaggacatcactcactgccaattagagttagctagccacaaaagacaaccagagattagcaacaccaagcagtcatgagcgagggacaaagaaaagcaggaacatcactgcacctcagaggttgaggggatatggcagaagcctaacactttgaggagctcagggaggactgcctagtgaaaactagagtcatacaggtgctaccaaaagactgcctaagagggaaccatgatctcccactggtgtcttatactggcagtgcccaggcagacgccagtaggaacagaagttctaaacccataacctacaccagctttcctgtggtagaatgctgcctgagaagatgatttgtctggaggcagatacaggactacacactcctaatggccatgtcaataaggaaagaagacacagaggtcaccaagcccagaagctgtttataagtaggatctacaatctgagacagtgacaacctgcctttccagcccacctgcctactaattcctataaggtgctcaatgcccgaacaagtgggtcctcttctattttccaaacaccaattatttggaggtttttccaatatatgctcattaagatcttttttgtggggcaaccttcattttgttttaattaattactaccactaatttttgtttgttttttgttttatttttttgagacagagttcctgtgtaatagctctggctgttctggaacttactttgtagaccaggctggcctcaaactcacagagatccacttgcctctgcctcctgagtgctgggattaaaggtgggtgccaccactgcctagcttttactactgctgttactatcccatcatcaccattattgttttgtagtactagagatggaatgtaggaccttaaacatgctaggcaagcatcttatcactgggctacattctcacctttgggaatcactccttttaaaaagtaaagattaaacgtgtatgtaaaaacctatttgttagcagggcgttggtggcccatgctttaatctcagcactcgggaggtagaggcaggaggatctctgtgagttcgaggccaacctggtctccagagtgagtgccaggataggctccaaagctacacagagaaaccctgtctcgaaaaaccaaaaaaaaaaaaaaaaaaaaaagaaaaccaaaaaaccaaaaaatcctatttgttttctgggctcagttaattaattacttcagtatttgctgaatgtccatgccaagcatcaaggacacacacagcaacaatataattcctacctatgagaaacagtctatgaagacgtaggtgctatgtaccaagaggctgagaagggcattttatttctgcttccaagtaccagctagtacaaaacatgcagttgccacaccctaagtcttcatttttagacttttctctaggtagccatggtcaaataagtaagttttggccacagagattcaagagattaatggattacacaatttccaggaagtgcccttaaaaggcacagtctgctcttatttttccatcttccagctgactgagaagtatcccctgatggctcaaggacccattacagatctatgaattaaggcacctaatcgtaagttgaaggtaacaaaacagaaacaatcttggtcccaacactgtaggtatcagcctgggacaggtgtcaaaccaacatttgtttaaggcaggtgcccatttttttgtttgttttgtttttgtttattctgtaaagagctacacagtaaatatttaagccttcagaaccaggtggtcattcaacactgctgctacagcaagacagcaaccacaaacagaaataaatgaatgagaatctatgtccccacaaagttttatttgtggacattaacattactttagattttttttccccaaccacttaataaaaaaataaaaatacattcttggcttatggctgtttacatggtggacagatttggcctcagggcctcagtttgctgacctctgattcaaattaatgtagcttggaatttcttcctataaactgaacatctatctaagaggcatactgacattgcatagacaaattggaaatactcagtaaaaatttgtagaataaataagcaagcagaacactgtcagacacaaacaatggagcttcttggagcacaggggatcagtatctcaccctgatagatatgctagcggtttattaaagagacactatagcaaaatccttcaacacagcaaagagccttgggttggtgggcaaataaacacagttcaatcataaagagcatgtgtgtaatgccctaagggaagaggcaagatgcctgaacacccaaaggctatcctgactctaatcttcacaatagagatctgctcatcaggagaaagcacacagcccaccaaggaaccagattatagtcaaggcatcgatgatccactaaaggatggtgagctgagaactgacatgatcacatcttcagttttaagatccttttgacaagagtatggactgacaggagaagtgtagttagagaagggaggtcaactcaaatcccatctctgattatttttgagacaaggtctcaagtagttcaggctgtccttgaacttgatcggtagtcaaggctgactctgaattcctgatcttcctgcctctatgccccaagtgttgggatcaaaggtgtgcgctactatacctagctccaatatccatcttcaccatggagatggtccttatctcctagctgaataaactactttcatttctgtgtttcctttgtatagggcttcccataacactaaaagaggaaaaatatcctccacttgtttccttgacttttaatctatgtgtgttttgttttgggtgggtaggtgtgtgtgtgtgtgtgtgttgagacaaggtctcactctttaacccaggttggcaagaaactatgtagcctaggctagtctcaaactcattcctcccagtgctggtattaacaggcatgaattaccacaccctgctactacagtctttattttgatttgggagggggtagttgtgtttgtgtgtagtgaatgcatggcataccaaggcagacatcgatgtcaccatacctgaccttttatgtccctgtgcttacatggaagtacctttactgactaagccatctcctcagtcccactatctgcttcttgaagacagtagtgatgctgttatctgtacatgcctcatgcctgcctgcctgccacaggaattgctcataaatattatcaaacataagcaactgattctaaatgatctgcaaacataccagatccatagccagaactagacaagccgatttaaagggatgatggatgactagcaaggtaataaagaccatgcttaaagctgctacagagtgccactgaggtggagagtagaccactctgggtatccgaggacctcaccggcattgggatcttagagagctcttttccaatgcagttcttcatgatgctccacaagttgaggctgtagttgggcttatatggtattctggttctcttttccttcttggtctcctccagctgatgcttgtactagaagcaaaaacaaagccacaaattcaatcagccacaaagaacaaaaaatctgctatctataaccttcccttcccccaatgcttaacaaacaacaggagtttctatttctcttagagcctcacagacaagtccttgggaatcaaaactaaagtccctcaactctgacaatctccaaataagagttacctgttcatcaaggctgatgtcactgctggctccactgatattgctaccagtacgtcttcatggatgaaaaacagaggagaattagagcaaagaacagaactaaagtttgggcctcatcagttctttatgaagcacaatgccaaatatctgcccacacttagaaagggtatgaatttggggtctctggagaattcagtgaatgctgacagttttccatctactcaacacaaagaaaacccacatcttagcaagtgtcaccagctcagattctcttgggaaagattctcatcatataaatacacatgttcattttcttcaacagtcaaggacaacttacttgtggcccaaattttcaggcatggtgataatctctggtgcatcaaaaaattcattctcgtcatcttcatcactcatgtcccctttgccagaacagcactgatctacaaggagaaaagcctcatttgttttctgtggttacatttaccaatgcctggcacagtgggttcttttaaatactgatcacaaacatggcaacaatggtagaaagcagcagaaaggccaaaagaaaccaacagctccaaatgcatctcacatgagccaccaattgtggagaatttcttctgtcaattgcagaaaccgcctgggtcatattggaacagctatgtaagcgctaactttcttctcacctttaccagagccagcactgccaggagtgttagctggcagcaccgtggctccccgaaatgctctctccaggtgattatgctgctttgccagctgctcaagagtctcttccagtcggatacgctggtctctttcatactgtagtgacttctgccactttttactatgagtctgggctaacatgaggaaatctctgcaggcctgtacagagaaagtattcgttatgtcacttcaactagtcagactccccacaaagtaaccttattctgggaacatgagaaggcatatgacaatttaatacttcctgctatttcacagtatcagggacaaccagctctgtgctgcaatcaaggtcagacttgggaaagagtgaacaacgttgtcatagttctcctattttcctggtcacgaggaccaagcaaataccaagtgagcaacaaacccagacaaggcatttgtggcagcagcacaaagggcgggcatgtgaactgcacctgagatctactggctgaaagataaagtgaatgacaactgctttcaataaaccaactaagctcacataacccaaagctgaggactgagacactgagaacagaatctgcactgactcaaactagagatgggataacttggctttgcttgtattttagttatttaggaaacaactgatctttttaggatactatcaaagatgggaagtagagaaaaacaacaccccccccccatctgattatctcagtccctttactggctcttcatggcaaggatcaaatcctaattactgttacaacacaaacggccctcccaggtatagccaccaaccacctgaatcctcctctccccgctgctgttacctctgtactgtacaacacaggcagacacactgaactcaccatttcttggacacacagccttcccctagccctaactacttaagtatatgctactcactctgcctgcactgctcttccatctcccctttctataagaaagcagaggacctatagagaaatggtacttctatgacacccacactcctgagcagccagttgcttctatctccttaccagtttcagcatacttccacctaacacatgcacagcagtatcatgactaagtttctatctctccagagggatcacaagcaactttaaaacacattttacagcttatacatatacaggtctccagctcctaacacatagcaggagcctcataaagtttgcttaataaataaacgaaggaaggaaccaatgtaagcttgaaagtgtattccctgttacagagaaactaaaaggttctattagaatgtctgctcccatggtttcaacaattgcctacaggtccaccaatggctactaaatcagtgattccaaattggactctctgagttcagaccagaatatccaagtacctattcaatggctcaaagtaacttcaaaatcagtgggcctcacgcttgattcaccacattctcttgctgcctcttgtttcttcctttgaatttctccatcacaaagcggttccaaaacccttcaagctgtccaaccctatggaggcgtctctctttcagttttgcttccttcttcatagccaaatatcaaagtcctagtgactatctaatattctggagtctgtaatctctttccattcctccacagcagaagcaggggagcatacatttggggttgggatggttggcctcaaatcacagctcttttctgccatctagttagttacagaactcctcttgcctcacagtcactgtaaacaaagactgacaacagagaccacctcagagctgtcactctttatacagagcactttgaaccacaccggttcacagtaagcattcagtaaggcagtagccctgtttgcttgcctcaagactggcctcagtctcttctagcaggtgaccacaagcctaagtctgcactgcccctaacctctaactcaagcctcacatctagctacctccttgctctaacagtcaccagcaggtgccagactctcaggagtccacatatgccatacatcactatccttgccaattcctctccctcattctcttttaataatactgatgataattgaaatttagcaagaatcactggacatggtggtacctgcctttaatctcagcactagagaggcagaggcaaacagatttctgtgattttgaggccagcctggtctacattataagttccaggacagctagagctacagagagaccctgtctcaaaagttaaaataaaaaaaaatattaagagacagttgtacctccaggcactcactgagcatttcaaatgtattaccaaaagtctttcaacaacaccgtgaaagatctactagtatcaaagcattcatagataagaagcagacgtcacaaaacggataggtttccctgggttatgcagacagtggaggacacagctggagtccaagtcccaagtctatattgccttctttctaggaaggttttcattctccttcagcatttggatgccgtgttagcttctttaattttcctagtacacactgaacacctccaatgtgctgcctatgcctattgtcacggcacagactgtctttgaaatcttgttcctcctgcctaagcctccagagtgctgagattaacaggcatgtgtcaccatacctggcttctttttaatatgcacattgcatttaaatccttgctattatcacctgaaagataaacagatgacaaaggacaaaaagtgcatttcaggcaacaatcagataacagggacacaggcagtggacaaggaagcaaagagggagagaacagcttacttctaccaagctattggatgacttggtgtgtgttgtgctgaggatcaaactcaaggcgtggagcttgctaggcaaatatattcccagagctacattcccctcctgaaagtttggttctgacttctaagagaccattcccgacataatctagaacttgaggatgaataattccccaaagaacaaagatgagcaatttccaagagaaaagactaaggcaaggctttggttctataaagcagggtttcttatttagaaaaaaatattcatactagaataaggaaaataaaaaagacagtcaggaagttgagtgatgttgataacaattagccatcattcttaggtgactgcgatatttgtagttttgttttgttttgtttttttactaacagtatacatatttgagtcctggaagatggctcaggggttaagtgcactggctgctcttgcacaggacctgggttcatttcccagcacccatatatagtggcttgtggataccaataactccagttccagggatctgatgccctcttctggcctccatatgcacagacatacatacagggcaaacacccatacacacaaaccacaaaatgtaagtctacagatttaccatggatatcagtttgtgtgattaccaggcttcctggtcactgaatgcctgcattagcactgacctgctgagtactccaagggggtgactaaccttcctgaaattcctaagaggaaaaactaatttgtcttctttctggctgggataaatcagagccctgcaggtgttcaacacttaaataaaggttaacacaactgccatcaagtaacaaagaaacaaaatgagaaaatgatatttccctttcatggcaggaaaaggtctttgatcttcaggcactacaggaattaaactagctcttctcacgatcactccctaaacaagggaaatccggcacttgtgaggtaactttacccatttaattagatagggagagaagctctgcaaaaccatttctcacagaatattcagctcacttgggaaatgtcctttagcgtctttatgtgcatgagagctaaaacaatccgtcaggtgagaatcagttaccaggagaggaaaaacagcattgtaaaacctggtgctcttttcatacctagcaatacaccagcaaggcccacgatgctttctttgtatttacccacagtctctaatgcccaagtggagtattctggaatcaaaggctaacactgaactaactagtattacaagttctcagcagtgcttgagccaggcctgcttgccatctcataggcaggacgccttagccatgcagggtctgactccaaggaagaaggaagcgaaagaacacaacagtgccaatgattcaagaggctctttcagctctgacagattagattaggaaaaaagagcaaagaggcaaaaccaaaaacaaaagaagttcaggcaccgaactaatagcacctcagatgccctgctgctctgagaaagaagtgtgcactacagggctccttactaccatttaagcagagcacctcccagctgggcagccagtcctgttccatgcaacagacaatgtaacctgaagcactcatcatccaagcaagacctggtacagtcagtgctttaccagctggatccaagggggtggggaaagtattacatttcagaggggaagtgtcataaagccagaggtgcaccacctttactcacattgatcatggcattggaggttatcctgaagagtgtggctcgttcattgacttgtttgattttctcattgctctcagcaggcagcttcagggactccagctcactgagggaacgctgcaaggcagtgccatgcttagctatcaagtcattgcatgtgctcaggtcttccactttgctggagagtgttcggagggtgttctgaagctcagtcttgtcagtttgtgagacagactcttcatctcctgattcatctgtagggacgtcaaggttaagttctgcctctaggatcaggacctactctgctccaagtaaaccaccatgcttcatgatgcaaattctgagcaactaagggctggttattccagaggagtcttctgtaagtgtggcccatggcctgtaccacacagacttgaagcccttcatagcgtcaagtcatactcctagacacttagattcagatgatcagaggcaaggcctgggaacctgcatttctctttaaagctatatgtatttataattatgtttgtgggggtaagggtagggcacatatgtcatagtacatatgtggagaggtcagagaactgtggaggtcagttctctccttccaccatgcagatctcagaagtggaattcgggttgtcactcttgttaggaagtgccctccccagataagccatctcactggcccagaatctgtgtttctaattgtgactaaagtagtcctaatgtatgctgaagtttaagatctactgatgaaaaggatattatgggaaactggatggttcttagaattaggaacatataactaagccttccaactctttttttgaggcagcatctaatgcagctcaggttagctttgaactccctatgtagctaagatgaccttgaacacctaatcctcttgcttccaactcctgaaagattatgaacaccacacctattttatgctgttgtgaggaatcaaaggctttatgcatagtaggtaagcactcttaccgactgtactacatccccagcaacaagcttttaaacattttaagcctgaggagtccaatgtaatccacactaattattactgcaaacccaccattatctttagggaggcatgctggccctctgcaaaatggggggcatcacagagcagcttcttgagataaagtgtacatcactaaaagctctattcatttttcttctccaagggaaagctgaacttcatgatgaacttatttgaccctaaagctactccacaagcaaaacaagagagctctcaaatcataaaccaagtaggaatctgtattgtacctctcaccaccagctttgtacttaacagtttatcactgcaaactgtttttccagcagtgtcactcctttgtggagctgacatcagcttcaaattaaacaaaaggaacaagaaaagacctgtcctgccgggtgttggtggcgcatgcctttaatcccagcactcgggaggcagaggccagcctggtctccagagtgagtaccaggataggctccaaagctacacagagaaaccctgtctctaaaaaccaaaaaaagaaaaaaaaaaaagaaaaaaaaaaaaagaaaaagacctgtcctttctgctagactgaggcaggggtcaagtcaagatataacctgtcaccacaaaactggtaaagcgatgaagtttcctctcatggctttaacatactaggcacagtatgggaaatgatggaaaataagctaggcaattggtaaaaaaaaaaaaaaaaaaaaagccagaactgaacatttcagtcctctgccaccaagcaagctcagtatgattatctatcaatagggcaaatcctattattttcttaaaaaaaaaaaaaaaaaagattttgactatttaagttgtgtttgtgtgtgtgtacccttagcagtcagagatggcagatcctcctgaagccagagtcacaatagttgtgagcttcctgattccagggctgagaactgaaatcccacgctctgcaagagcaggatgcactcctaaccagtgggccatctctccagccctgagaacactgttttttaggtcagctatcaattctgttacaactttaacaaacgagaagctatcagaagctggcctaaaatttcagcacttgagaggtagagacagaggaatcaggagttcaaggtcttaaactacagagtgagtttagggccagcctgggacatgaaactgccagaaaaaaaaacaaaacaaaaaaacctaggtcaagtaagaatcctaatactgagctagtaacaaaataattatgtctcaactaacaaaggcacaggccaagcattagtgaagcatgtctttggtcctagcactcaggaggagaggctggaagatggggttctgggacagccaaggttactagtaagaccctgaatcaaaaaaattaaaaaaaaaaaaaaaaaaaaaaaaaaaaagcctaagtgctatgttctatctctagtaccaaggtttttcaacttcagctagttggttctttgttgcagggtggggtgcctcataaggaattaagcagtgtctttggcttctaatctctatgtgccagtcacaccccagatttcattattttaactaaaaatgctgtatgtgcatgtgtaggactgaactcagtttagaaccactactcaagagaagtaacatccaatgagaagcttgagatatctaaggcatggggcataatcaaaagctacattgcagtcaagggtaaaacctgtgttactcaggtccagtgtttctttgctccatacctgactctgccagcatcttcacagccttggctttggccagttccagggctgtcacccagcgctgcctctctacttctgagctggccttcaagtggtaggtctgagcacccccattggaaatgataaagttgcaagagtcctccacagtgatgttggctgtggcaaggttgatggtaccacggcaggtgtgtctcatttctgctttggacctgccatagcaagacaaaaaaggctgaacagaaaggtaatagatatttgtcctgctctgcttttagtttttttttcataactctgagcactttgaaaattaagcagtcttaggaattagcaaatttttcaacccttggaaatgtaagcattgggaaattgctttcagagcttataaacataatgtgagtcagattttactgccccactgttcctcttaccattagctttaaaatacagtcttcactgagataaaattgcgtgaaatattaattcagcagttaattaagtacaactgaatgagttttgacaaatggatccaattgtgcaaccactaccacaatccaagtgaagaacattccctcacctaacaaagctccctcatgcccatttgaagtcagaaaacactttttacttagcaagttataaaacactttataaccttgtgcaacaaaaatttttgacactctcattctctaagaatagctccatttttatacactgagccaccccctcactgtaaatcagcccaaatgagaactgtcatgccacacttaggatcatattgcaaaagtgtataaaagataaatctttagcgattagactattaaatattggtcatggctcaaatgataagaaataactatctgtctgagacactaaagaataaccacaaaagaatcaccaggcattttaatctttctagaaaacgcagtttcctaagttccagacttttattggtgggaacttctaagccatcctattaatagccaggaaagattcagcaggtctgcactcaagaggactgggtgtaaaaatttccccaatgtctactgacagttctattaatagactaacttttgaactttacaacattacttggtaacaacaagttacaaagcacttgacataaaatatcaagattcacattaaacatcaaactcacagcactactgagaatgcaaagaaaactgtgttcatcttttcactaccgctggctatgcccagggaccttcacattgaaactgcagttttccctgtccaaatcggaacataaagaggtcaaagtcctttgccacattacaaagcagtagagccaagcagccaaatatacctggcacatccagaattcctacatgccaggaagggcacacacccttctccagacacccaagatttagtatgtttgagaaagtctgtttactgcccttaggaagacagatccactgttgttcacttcatcacatgtaacttttttttctttctcaaatgtactaatgagcaacaggggatcctggagtgggggtaggggtctcaaaggactggccattttccttgtcctgcacctgccactgtaacgtgaactcctgctttttctattcttacctctcagccccaagcttcagttacattatgaataatgcaggctgaattacagactcacagctgaaggccagtttacccttactacttgggcctccatcacattcctccctccttattggcacttttcactaaccacctcctaggatctcttctgcctccccggcttcatgcaccaaagaagcttctcggataatagaaagtctacagctgtttaacagacactaagaaacaatgggagggaagcaggcttgactacagctcttaggctcaggcaaacacacctatggttataaatgtttagaaccgaggcaggaaagattctgagagtgcaggaaaagttcttgcctgataaggccagatgaaatagtaatttaatctctagaagctaaaagaaaaaccaatactatagcctggggtgtttggggagtgctgggattctgtataagagaatagattatggggtatctatgtaaagaaacataagaacgataaaaggaaggcttgcacacgtctgttctctgtcattagaggatggagtctatgaaggaaaaaggtattttagaaatggcatacataagagactctaggttttggacatatgacaatcagagaaggaataacatagttaaataattctagaaaagaaatgaggatcacaggcaccataccaggaagaataaactgtcaatgctgtagaaaggaggtacttccctgggagtgtaaggttatgtatagattgataaactggaccctgttgattggttggtttgtgagtgggaccatcctagttggcaaggacagactaatggtatatttttgtatgtttcagaaggagtttacatggagtcagctactgtgaaaaagaaggtaaaagtaacaacaaatacaaagagatggcaacaggtaagttattaatgtccaaggtcagcactgatcaagattgatactgaacaaacaaccaaatagcctgaaaagcagatcactcaagaatttggttggattacaaagaccacagaatatttttaatttttcttagatttactttatgtgggtttttttgttgtttgtttgggttttgtttttgtttgtttgttttgtgtttttagatacagggtttctctgtatagcactggctgccctggaagaccaggctggcctcgaactcacaaagatttgcctgtctctgccttttactggaattaaagcttgttatcaccatgcccatcccataatgaacaatatttgaaaatggggaatcagtgtcattagtgatttatgaaccaagttaggatatgaaagaactgaacattagaatagaaacaagatatgagcttgaataaatggggcaaaactttgggtcaaactttagatacatgttataatcctaaactgagttctggatgagcagaagaaaagggctcattaaaacaaagtcaaactacaacaatgcaaatgtgattcacaactaatgttgcttaagcatagaggatgagctaccttacagcatcttctatgcttgagaagaagataacaatgcccccatgacaacctctaagtcttgtcttcaagctttcgttaaaagtctccaaaaaacaagccaatgttgtttatgagaaacttatttgcttactctgaaatttttggtatcgagaatgactactggtgaaactaaaaagaaatacaggctgaaccattcttctacacagatcagtgtcttgggttcccaaactggatgacctttgggaagagatttcaattaaaaatggcattatactaagcaaattcctcttaaagtatacttatgtactttttgcatgaagcacattgtaaccataatctataaaccctgttttaggtaattatctctgtatctaattggttcatgtaacactaacctaggttttaggttatattggtatgatcattaacttgaaatcttcacttctctaagaccttgggagagtctgcttctttgtcaggaacatgggaacatgtcctaactcccaggaagctaggagatctatgagtactgaatgaaatgttgcatgtaaggcatccagcctcaatgcccagacactgggaatgcttatgatctatccccaaatcacctctcaacagctctgtctagtaatataagccccaaagtgtgacatgttattaccacgttatgagtcacggtaagtatacccataccaaaataagcatttcaaaaacactcatacttcctttaataaaatgtaagtaaaactaaaaagagcacgggacttctggctaagacaatcatccctgtgggaggaggtggggcaagcaaatgtaaaagctatagcaagagtacacatctccattctgggctgtccagaccgagaaagtaagcgcacgcttaaagaggtaagacatatatatggtggacagaatccccaagtctccctgtctgtggtgttctgatgtctgaatgtgtggagcgagcaagcaagggcaggaattatcaagagtgtgtcaggaacttttaatttgcgagactggagcacatgaagttaggagttagaacttccactgtaagttcctgaggggcagtgcccgagctctgtctgtgccgctctagcctcacaacagtgccttacttgcagaattagcgattgcacccacgtggtagcggaaatacaatggcagagcagctgctctccaaacaattgctgacaggaaagacccagggatggaggcagacgaggcaccagagacgggtgatggcggggacaggagcggcatgtcaaatcttggaggggatgacttttgcaagctgtcagcctgcacaggtgacagacagggacccagagagaccttggctgcgaagccggccggaggagagtgacagcgcgggcccgtgggctgcgctgggggaggccaggtgagcgtggcgccccggaagcagttacctgtagtagctcagtagcccgttgctcagcacgaaccatcgccgctggtagcccttgatgtaattggtccatttgaagagccagccctctctagcagagcccgagcctccggcgcccgaaccgcccgagccggcggctggcggtgcagagcccgggccgcccgccgccactcccccggctccgggccagggcgcccgccgccgccgctgacgcggacgccaccccggagccgggccccgcgtccccgcgtccgccgccgcctcccaccgcgggtggaccggcgccgccgccgcccggagctgcgatggcggccggcccggccccaccactcctctcagctcggtcgccgccatgagccgccgccgcccggagagacaagaccggaaccgcctacgagcgccgccaccgccgcccggagcgcccaacacggctagcgcttcagccgccgccgcgcagcgtccccgccccgccagccccgccgcgggaaggagggctcggccgccgggaaggagggcggcgattggtgccgccaagtgtcacttgcggaagaccccgcggacattggcatttctctcgggcctgtcatgctactccgcccagtgagaagctcggggcgcgacgcgtcctccaggcctgatttcgattggcttaaaggaaagtcaatcaggcagatctccaaagccattggtgcttctctgaagtccgaggacgggagaatgcagagcgcccggccggtttggcctctgattggctactatttccgccagtcatttcagtttatgcttctgtcactgccacgtcacccccgcccatcgctctgcccttcgtcctcttccgctcttaggcattggtggttgacatcagctgctcaagcctttctaccaattattgaacgcattgaggtaaaaggggcagagtccggccttcacaaagtcattcttcttctttactggctgatatctatgtctttcacacgtcgatggagaggcggagctgtgcttggagatgattggttctgggaattgtcagtgaaagctggggaaggccgagacatcaaatacattcctagacgcaggagtgggccgcgcccttctgttcgcagctttaaggaagcggtggactgctataagtgctctttgatgtgggcgtgttgtggaattccctcctgaattaagatttgcagatggtcttgatagagatggatggtttctgggtcctcctagggattcccttctcaggccctgcttcctgaagagcccagaaagagcttccttagctccctcctgcacccacgacgcctcccacttcccacccccatcctagtccctttcctggtttaccctctgtcttttcattctagattgttatacacttctgctgattctgaccatctatttgccgacctagtttccggggagaatagattagcaaagacctaccggcctttatatttcttttcagatctaaaagcctttgttaggtttagtgtggtaaaaacacaaatactactattcttgtttgttgttgggtttttgttgttttgttttgtactgagtgtcgaatcattaggtttgatgagttttattacagcttgtgttgggggggtcacaaattcagtaactagtgcagcattgagctgttgtaaattataacaaaaatagccaaaaatctatacttcggggaacccaatacctgtttaaagtttagcagttgtagctgatagtaggaacttttattttttatttttttctaattacgtgtgtgtgtgtgtgtgtgtgtgtgtatctgtgtatctgtttgcatttgtgtgcaggtacttgtggatgccagaagagtaaatacgatccccctggagctggagttaaagctgaagggtaatcaacccatagggatactgggaacagaacttgagccttctagaagatcgggaagcacctttagccatctctctaaccccaggaattgcttttagatcctgtaaaaactattttcctcttggatgtcaagaaagtaatctaaaccagggagtgggggtacacctttaattccagcacagaagcaagaggccgaaagatctgtgagttcaaggccatcctggtctatagagtaagtaaggccagggctacacagagaaatcttaacaacaacaaaggacaactgacatagctgtcacctcgtggtggtacctttctttaaaccagcactcaagaaggagaggagttccaggatggccaggactacaaagagaaaccttgtctttaaaaaaaaaaaaaaaaaaaaaaaagttatctagcatgtttgtttgggaagcctggcttctcactttggtaaaaaatgattacagcaaaaacaagggcccgcacaataatgcagttgtaataaagttcatttgagtttcgacaaactgcaaacagatgtaaaaattgtgagcagtgctgcctcttgttcctttgttcaatgtgcagtcacaaaggagaaacacacttttaaaaccaggaggtctggctgtcccaatttcaacctagtaatctactttaacatcattgacccaggaacaacatttttatgaggtccctgtgatcttgcagcacaaagtacatattagtgccatcagtgaatgagattttcttgccaaaataattgaaagtgaatcatgtaaagcctctagatctgcactcctgtttctaggggctagagaaagttcaacaataggtcgaaggagacagtcaaatcaagaatatggtctccagagagatggctcagtggttgtgaagttttctgctcctgctcacaacccaacttctctcagctcaaacccccaatcgctggtcatcccagttccaaagatccaatgcctctgtcttcctctggcaactgcttcgggactggggtggggtgggggtagggggatggtgttgggttcaagacagggtttctctgtgtagcttttggaacctgtcctggaacttgctttgtagaccaggctggcctcaaactcacagagatccacctgcctcccaagtgctgggattaaaggcacgtgccaccacagcccagtctaaaacacttatttttaatgagtgaatttaaagaccgaggattagctcagttggtggagggcttgcctggcatgcacaagaacctgaattctattcctcagcaccactcactaggagaggaaggcagtaaacttattcaagaccagcctgggctacatattagggtgattctgtttgctagctaacaaacaaacaaacaaacttaaagacacaggcaaataccagattggattctggttctgcaaaaatgacttttagacttttttttccagcacagttgcaaaatacaaactgtctggtattatcagcctgttgttaggcagttactacattaattcagtgttaatgtgggagatctgaaaataaatctttaagagttggagaactggccaggcatagtggcccacacctttagtcccagcactcaggaggcatatgtaggcagatttcttgagttcaaagccagcctggtctgcagaatgagttccaggacagccaaggctgttacacagagaaaccctgtctcaaaaaccaaacaaacaaacaaaaaaagatttgggaaactatgccaaagtatatagaagtgaatgttgcactatctaatttcctttgaaatgattcaccacaaaaggcagaaaaaggaagacggtccctaaatcactatgtttactttcatcagtgagacagagtttctgagaaacggcttgcagtaggaagaatttattttgccttctcatttccaaagttcctgctcagggtctccttgctccactgattctgggcctgcatggatgagacgagcatgtagtcagcaaagcaccttacagagaagggccagtcctcagtgttctacttcctccaagtcttagagagttagctcaggagtaagagtgcttacttctcatctccaggtttttgagacaggctttctgtgtgtgtaacagtccaggccatcctggaactcaatttgtagaccaggctggcctcaaactcacagagatcttcctgcctctgcctcctgaatgctgggattaaaggtgtgagctacctctaccctggggccttactgaacctacaaaggactgaggctcactatctagcacctataactctgaaactccaggtctaggggatttgaatcttctttttgacctccttgggctcttgtacacacataatgcacaaacatattctcaggcacacataggtatacatacatttttgttttgtttttcgagacagggtttctctgtgtttctttggagcctatcctggcactcactctggagaccaggctggcctcgaactcactgagatccgcctacctctgcctcctgagtgctgtgattaaaggtgtgcaccaccaacacccggctggtgtacatacatttttaaaaaatagatttgcctattgattagttcaaagcccttatgagaacatcacatttcagtgattgaatccaccacatgggggaaccaagccttcaagaaaggaaccatttggcaggtgctccctatatgtaaatcatcacaggagtgtgtaccctaaaatctgcacacatggagacgtacatatctatgtgcttacctaaaaagcaaatatagcaaaaccggaactggttggttggttgtttttctcacatatcaagtacatcactgtttgttgtgctacaatttttatttttgttcaaaaagattttcaaacagcttcgtgtggtggtgtatggctttaatctcagcacttgacagatagaggcagggagatctctgagttcaagaccagtctggtctactgagccagttctaggacagccagtgctatgcagagaaactgtctttaaaaaaaaaaaaaaaagttactaagttgaattattgttactccaaaccacctccagaatacaactcagaatttttagtgtggcagatgaggtccctctgggaaccatctctgcccaccccttcctctcctgcttttgtctccatgctccattaaattgatgcacacaccttctccaggtgggccctggacttcctccgactggtgcctttgtagagactttctctctctctcagtgaccaatgtgattactacatttctatagagtatccccttggtctttatcctgtagcaatccccctacagactcacactttccctatagtattgtcttaagttttagtaaaaacatcagagaaatgcaacttgaaaaaggggacattagttttagatcataattttagaactctcagtcacagcaggaaggggtgggacaggagggagagagagcatgcctgtagtgatgaggcatgagggctttctttttttctccttttattttatgcaacctgtggattgctgctctccatattcaaggggaggttgtctttatccctcagttaactctctcagcaaatgccctcatagacccaaaaggtgtgcttcactaatttacttgtctatcaatccaataaacttgatgagattaacctttatggggctagagagatgactcagaggttaagattgagtccaattcttacagaggaccagagttttcttcctagatcttacatcaggtagctcatagctgcctataacttcagcttgagagggatcctagcctccaagggaactctgacctccaagggaactcatatacgcacgcacacacatacaattaaaaataaattagttgtgcatctgttatcagcttgaagcctcagccatgtgttgggaacaccagagtaaacatacaaatagactggctctgtgtgacctgagggtcagaggcataatcaatacggaacatgtgaatggatagacacagtatttgtacagagaaaagtattacaatgattatacacacaagaaaagctgtggaggtcaactggggtgttaggaaagagagtaacaagtgtaatttatttcaaagaagaataatcactctttaagctataatctggcagttgagaatgagttaggaaataatagagacagtcattcatgtgaaagggtctgaggaggaaaaagacagtgacccaggtggagacagaacatggtgcttggagacctggatttctttcttagtgcacggggacttagttaaagcaagtgacctcagcttttgtttaaagcctaccagtggctgctcttatccagcatgcacaaagccctgggctcaatctctggcaccccattaactggcacacacctgtaatcccattatatagcacttgagaggtagagacaggaggtacaagataccctgcctgaaaaaaacccgaaaaacagcaaacaaagaaacaaacaaaagctggtaacgtcactgaatactgtgacaacagatatgggaagatgctgacaaattccagggttttggagttaggattggtgcatctcagtggtttagtcaatgtgtgtgaggacaaatgtttgaaattactgtttagtattctcatcgagtcctgaactctatgtagtcattcagtcacccacccctatgtaatcttctatgcagcccttttctttatggagtctgtgtaggggaagctgtagccacgcctacttaggggctggctacaggtgtgcctgaccacgccctcacaagcttgcgagggcgtggtcaggggatgtagggtgactacgtttgttcttttgctttcactttgcttcttgctgtacagactgctgtcacgctggctggctaggtcgctctgtaagtaaggcttttccctgttaagtacccttatatttctacctaactccgtattggtaatttcccactatatttggtatcagaagtgggattcgaacccacgcctccaagggagactgcgagctgaacacagagctctgtaccttcaacgactatgtgtgccttcagcctatcttctagaatgcatctcacacaacgcctccaggggcatcttcttaatccagtctattctccatccagaattctccttttttggtgttgttttgttttatttttgtttgtttttttctttttgctgagataaggtttcgtggtgcagacctggctggcctcaaactcatagagatcagcctgcttcctgagtgctgggattaaagatgcatgtcatcacgcctgaccttctccatccaggattctcaatggcttccttgatctagaggttgaaatccaacaactcctctgctggttctaaccttccttcatggtcccaattttcactgttcagtctatacaaatgccagtacttttgacatttatacactcattacttttttttttttttaaacaaagactccttttacacaaccatcctctggtttttgtttttgtttttgtttttgtttttgtttttgttttgagacagtctattgtagccctggtactggaactcactgtgtagaccaggctagcctcaaatacacagagatccacttgcctctgcctcctgagtgctgggagtaaaggagcataccaccatgcttggcagggaatgtatacatgttttagcaattagcaataaaatggatatgaagaaagatctgtgtgcagcattgtttcttttttgttaaatttaaattagaaacaagcttgttttacatgccaatcccagttcccgctccctcccctcctcccctgccccccactgagtctttttaagtttttttttaagtcaacacacaaagaagtagttttattacagcatttctttttgtgtgcacacgtatacatgtaggtacgtgagtacaattgtgcacatagaggccaggggtcaaccatgggtgacatgatcacctggtttttattggcctggaggaacttgctgacctgattatcctgggtggctgtcaagcctttatcttatctctggctccccagcccgagattacagatgtggaccaccacattcagctgtttttttttggggggggggtttcgagatagggtttctctgtggctttggaggctgtcctggaaattgctcttgtagaccaggctggtctcgaactcacagagatctgcctgccaactgcagggattaaagtcatgcaccaccaccgcctgactgctccacattcagctttttaaataaggttctggggattaaacaagtggttccctgcccaggccccctgcctccctcacctcccatccccccacccctgcccaagcaaagccctttactgattatcactccagtccacattacagaatctccacaccaatactttatttctaattactccctcctcggctctgctggtgtcttctcccctccaaatagtcccccatctgccttcctgtaatatgtattccattgcttcctagttcatttttcttccatctgagcatacacgtttttagataaacatgtttcctacttgccaggttaaacttttaaacttatttttcattgtgcatggtgacaatggttctatggcccaactttgaccatgtgatattttgctaatggcacagatgtttgtggtgtgtaaaccttgttaatgtagtgcaatctgggcattgggtgcccctattttaccctcacttcatttgcatagtccataaaacacattgttattggaaaagagaatcttttttaaaattttaattattgattgatttgtgcatgtgtgttttcagttaaagtactcaccatatagctcaggctggcctagatcttactgtgtagaccaagctggctttgaactgacagagatccacccgcctggcattacagcaccatgccccaacaactgatttgttgttttaagggacagtaagagtctctttggttcttgatatttttgttttgtttttgagacagggtttctctgtgtagccctgagtgtcttggaactcaatctgtagaccaggctggtctcaaattcagagatctgactacctttgcctcctgggtgctgggatgaaaagtgtttaccaccactgcccggtccaggagtgtctttgtaaatatgaatgtgaagtaatttgagtttgccttagactgaattctcccaaggcgttactggaaacactcctttctgggaaatgaaagcagcaggaagggccagaagcagaagaatgaatgtaatagcaacagataccctcaagcacagcatgagctggactggagtcagcttgctgaggtgctcaagcttcagagtagataagcctcagccttttccctgaagattgcccagggagtgggcaatcctgagaaacagacactcagctgtgagccatcagtcactaacacttgcagctgaggacactgcttagtcctaacatgagcatctaggaggttgctccagagcatcctatactccataagcacttcccctcttaggccaagacttcgttagttctcttaacctacatgaaagaccctgctaggagctgaacttagtaaccctgttgttgcttgccagagagacactaattccttttctccctaagtgattcgtagtgtctaccggttccaggtcctgtactcagagtgggaaagagcttggggaatgaattctatttttgtgatcactggggattggtctaatttcctttgtttgctatctaacttttcctggagcaagggctgtctctgagccttctaaccttcctctttcactcaagtctaggcaaccgaatgatgtaattcattgaaactaaggagacagagtgagggtgtcagaagggatccttgagagagaaggaaataatgtgccttctgcttttggctccttaggtgtaagcaccacattgtgtgttttcaaataaggaggagagctttgtgcccctcgttcggtcacaatgtcccagggcataaatcctgtgtttgctaaatacattcaatcttgggctgtttatacaacagcttgacaattttccaatcaccatattagtaactgtttcttaaggatttgggggaggattaaatgaaaacacaggaaatgtgccttgatttatgatactaaatgctacctgtaattattaattgtgaaaggccattagagcccaatatatctcacccaagttgtagttcagatttgacgcttccctcccacaggctcatatgcagaaggtttggtccctagctaatgaccataataagaagtgatggtatcataggatatagctgcatcatttgtaaactcataactgaatgggctatgaggagacggggcctggttagaggaagtaggtttatgaggcctaggggcctgcctttaaagggctatctttacgcctggactcttcctctgttgccctgcctgctgccaggaagggaaatgccctatccaccacaagttccctgccccttagcaatggaactaagtgatcatgggttgaacccatgagaccagaatcagcccttcatcccttaagttgtccttgttgttgttaaagcattttttttttaatgtgtatacatgtatcctactggtttgtaagtgtaccacatgcaagcagtgtctgaggaggccagtcagagtgtcagatcccctggaattagagttacaggaagttgtgagctacgtgattagggtgctgggaaccatgctctgtcttctaaaagaacaagtaattttaccactgagccatctttctacaacaacccaaattgttttttttttttttaatagatattttgtcccagtaactaaaaactcaaatggttttcaaggacagcatcagacatgttgtagagaagtctggaaacatttgaactttttagaagcagtagtagatttttatttttttgtaaagtatcttcatgtgtcgcactgtttatgttttcataccatcctcacttctagctacatttctgtggagaggacagaaactcaaacaagcaaagtaacatcaaacacagatgtgactaggcatgtcatatattacctatgttttgtcatctttcatttatttacttaggtttttcaagacagtgtttctctgtgtaatagtcctggaattcactttgtagaccaggctggcctcaaactcatagagatctacctgcttctgcctcccaagtactgggattaaaggtgtgtatcaaccacctggcaatttttgccttcttttttttgttttgtttttgttttatgttttttttttttnnnnnnnnnnnnnnnnnnnnnnnnnnnnnnnnnnnnnnnnnnnnnnnnnnnnnnnnnnnnnnnnnnnnnnnnnnnnnnnnnnnnnnnnnnnnnnnnnnnnnnnnnnnnnnnnnnnnnnnnnnnnnnnnnnnnnnnnnnnnnnnnnnnnnnnnnnnnnnnnnnnnnnnnnnnnnnnnnnnnnnnnnnnnnnnnnnnnnnnnnnnnnnnnnnnnnnnnnnnnnnnnnnnnnnnnnnnnnnnnnnnnnnnnnnnnnnnnnnnnnnnnnnnnnnnnnnnnnnnnnnnnnnnnnnnnnnnnnnnnnnnnnnnnnnnnnnnnnnnnnnnnnnnnnnnnnnnnnnnnnnnnnnnnnnnnnnnnnnnnnnnnnnnnnnnnnnnnnnnnnnnnnnnnnnnnnnnnnnnnnnnnnnnnnnnnnnnnnnnnnnnnnnnnnnnnnnnnnnnnnnnnnnnnnnnnnnnnnnnnnnnnnnnnnnnnnnnnnnnnnnnnnnnnnnnnnnnnnnnnnnnnnnnnnnnnnnnnnnnnnnnnnnnnnnnnnnnnnnnnnnnnnnnnnnnnnnnnnnnnnnnnnnnnnnnnnnnnnnnnnnnnnnnnnnnnnnnnnnnnnnnnnnnnnnnnnnnnnnnnnnnnnnnnnnnnnnnnnnnnnnnnnnnnnnnnnnnnnnnnnnnnnnnnnnnnnnnnnnnnnnnnnnnnnnnnnnnnnnnnnnnnnnnnnnnnnnnnnnnnnnnnnnnnnnnnnnnnnnnnnnnnnnnnnnnnnnnnnnnnnnnnnnnnnnnnnnnnnnnnnnnnnnnnnnnnnnnnnnnnnnnnnnnnnnnnnnnnnnnnnnnnnnnnnnnnnnnnnnnnnnnnnnnnnnnnnnnnnnnnnnnnnnnnnnnnnnnnnnnnnnnnnnnnnnnnnnnnnnnnnnnnnnnnnnnnnnnnnnnnnnnnnnnnnnnnnnnnnnnnnnnnnnnnnnnnnnnnnnnnnnnnnnnnnnnnnnnnnnnnnnnnnnnnnnnnnnnnnnnnnnnnnnnnnnnnnnnnnnnnnnnnnnnnnnnnnnnnnnnnnnnnnnnnnnnnnnnnnnnnnnnnnnnnnnnnnnnnnnnnnnnnnnnnnnnnnnnnnnnnnnnnnnnnnnnnnnnnnnnnnnnnnnnnnnnnnnnnnnnnnnnnnnnnnnnnnnnnnnnnnnnnnnnnnnnnnnnnnnnnnnnnnnnnnnnnnnnnnnnnnnnnnnnnnnnnnnnnnnnnnnnnnnnnnnnnnnnnnnnnnnnnnnnnnnnnnnnnnnnnnnnnnnnnnnnnnnnnnnnnnnnnnnnnnnnnnnnnnnnnnnnnnnnnnnnnnnnnnnnnnnnnnnnnnnnnnnnnnnnnnnnnnnnnnnnnnnnnnnnnnnnnnnnnnnnnnnnnnnnnnnnnnnnnnnnnnnnnnnnnnnnnnnnnnnnnnnnnnnnnnnnnnnnnnnnnnnnnnnnnnnnnnnnnnnnnnnnnnnnnnnnnnnnnnnnnnnnnnnnnnnnnnnnnnnnnnnnnnnnnnnnnnnnnnnnnnnnnnnnnnnnnnnnnnnnnnnnnnnnnnnnnnnnnnnnnnnnnnnnnnnnnnnnnnnnnnnnnnnnnnnnnnnnnnnnnnnnnnnnnnnnnnnnnnnnnnnnnnnnnnnnnnnnnnnnnnnnnnnnnnnnnnnnnnnnnnnnnnnnnnnnnnnnnnnnnnnnnnnnnnnnnnnnnnnnnnnnnnnnnnnnnnnnnnnnnnnnnnnnnnnnnnnnnnnnnnnnnnnnnnnnnnnnnnnnnnnnnnnnnnnnnnnnnnnnnnnnnnnnnnnnnnnnnnnnnnnnnnnnnnnnnnnnnnnnnnnnnnnnnnnnnnnnnnnnnnnnnnnnnnnnnnnnnnnnnnnnnnnnnnnnnnnnnnnnnnnnnnnnnnnnnnnnnnnnnnnnnnnnnnnnnnnnnnnnnnnnnnnnnnnnnnnnnnnnnnnnnnnnnnnnnnnnnnnnnnnnnnnnnnnnnnnnnnnnnnnnnnnnnnnnnnnnnnnnnnnnnnnnnnnnnnnnnnnnnnnnnnnnnnnnnnnnnnnnnnnnnnnnnnnnnnnnnnnnnnnnnnnnnnnnnnnnnnnnnnnnnnnnnnnnnnnnnnnnnnnnnnnnnnnnnnnnnnnnnnnnnnnnnnnnnnnnnnnnnnnnnnnnnnnnnnnnnnnnnnnnnnnnnnnnnnnnnnnnnnnnnnnnnnnnnnnnnnnnnnnnnnnnnnnnnnnnnnnnnnnnnnnnnnnnnnnnnnnnnnnnnnnnnnnnnnnnnnnnnnnnnnnnnnnnnnnnnnnnnnnnnnnnnnnnnnnnnnnnnnnnnnnnnnnnnnnnnnnnnnnnnnnnnnnnnnnnnnnnnnnnnnnnnnnnnnnnnnnnnnnnnnnnnnnnnnnnnnnnnnnnnnnnnnnnnnnnnnnnnnnnnnnnnnnnnnnnnnnnnnnnnnnnnnnnnnnnnnnnnnnnnnnnnnnnnnnnnnnnnnnnnnnnnnnnnnnnnnnnnnnnnnnnnnnnnnnnnnnnnnnnnnnnnnnnnnnnnnnnnnnnnnnnnnnnnnnnnnnnnnnnnnnnnnnnnnnnnnnnnnnnnnnnnnnnnnnnnnnnnnnnnnnnnnnnnnnnnnnnnnnnnnnnnnnnnnnnnnnnnnnnnnnnnnnnnnnnnnnnnnnntttgtgtgtcaacttgacacaagctagagtcatcagagaggaaggaacctcagttgagaaaatgcctccatgagattcagctgtaaggcattttctcaattagtgatcaatgggagagggttctataagaaagcaggctgagcaagccatgagagcaagctagtgtgagcagcatccctccatggccgcctctgcatcagctcctgcctccagaatcctgccctgtttgagttcctgtcctgacttccttctatggtaaacagtgctgtggaagtgtaagtcaaataaaccctttcctctccaacttgctttttggtcatgatgtttcatcacagcaacagaaaccctagctaagactctatcatcaacactgaaaagagatataataagctatgtaaacttttagcatcagaagaaaatgcaattgaaagaagaagcattggagagaaaagagagagaataagagagaaaaccaagttattaagagtaaagaagaaaaaagagaggcaagatttttatggctaaaaaattggaccagcaattgaggagacactttgaagagttcaatactaagttggtttgtgtccatgggagaacgtgggtgaggagtggagagcattcagcaaggagctaaagaggcaaaaactggtgcaaacgcagatgttcacaaggttcttctgggaggaaaacagattaaacaaggaacagtgagaagtccaagaagagaggaaacagaaagacctggcgaaaaacacacacctgggaccaaaggcctctgtcaccagcatccaggagcaaaggcatgctgtacagtgaacgaagggagaggaggcctgcctcctgcagcacagcaatgcataggttaaactagaggaccgaaagagaagctccagaaacagaaggcaccaggaaactaagaaaagcaagagaagatagagtctatgcagcaggcgcacagacaagacggggctggagcaagaaacttgtgggatgggcccttcaagacttagaaaagggtgcagataaaaataagcaaatgagagaagtcacggcaagagaaaagaaggcatgttataactatgtaatgtagcaatgaaaggaagaaatggctcaggagaaaatgggaccgaacactagaggacacaaaggcaaagaagttggctgaggagggccaggagctggcacttacaaggcaggcaaggatggaactcatgaatgaggatatgtgtacaaggagactccaattttcaggaaaacataaggtactgagttatatctattttattatttgcctttacttttttaaatttgctttttacattccaattccagttccccctccctctgctcctcctgctctcctttccttcccccatcccacctcccatttgctcctcagagagggtaaggcctcccctaggatgtcaactaagtctgtcccatcaactcgttgaggcaggagcaaggcaccctccccacaactgtgtctattctgagcaaggtatctctccatacagaatgggctccactaagtcagtttatgcattagagttagatcttggtcccattgccagtggcttcatatactgcccaagccacaccattgtcacttgtgttcaggggtcctagttctgtcctatgccagttccccagtagacagtgtggagtcatcagtggtctcccactagctctgggtagctggttctgtgggtttccccatcatggtcttgactcctttgctcacattgtcactcttccctcaacttgattgtactttgggaggttggcccaatggttagttttagactccatgtctgcttccatatgcttctggaagagggatctagcttctctggggttgtggattgtagctggttatactttgctttatgtctggtattcacttatgagtgagtacatactatatttgtctttctggatctgggttacctcactcaggatgtttttattctagttctgttcatttgcttgcaaatttaaagatgtcattgtttcttatttgcctttactttttaaaagttaattgtttcctctgactattctctctgcccaccaaccctgcctgtccttccactgcctattggccattcagctttttattagatcaaccaggtgctttaggcaggcaaggtgaaacaaatgcagtggttaagatcatttgcaattgtgggtcaggaggtcctgcatcattcagttcttagcacctacttggtcagttcacagctacctataactccagctcttttggcctccaagagtactgacactcatgtagacacacacacacacacacacacacacacacacacacacacacacacacacacacacacacagtaatttttttttttcttttggtttttcgagacagggtttctctgtgtagctttggagcctatcctggtactcgctctgtagaccaggctggcctcgaactcacagagatcggcctgcctctgccttcctagtgctgggattaaaggcgtgggacaccaacacctggccaaagtaaatatttttaaagttatttcctcaatgatttcaccttgttttgctttgctttgttttgagacagagtctcatgtggctaggctggtcttgaactcctggcctcttgcctctacttttcaagtgctgagattatagggaagcatctttacaaccttaccttttatttatttttttgttgcagatttttttatttgaattagaaacaagcttgttttacatgtcactcccagttccctctccctcccctgctcccctatcaccacctcccagctaaaacccgacctatcacctatcctttctgctctccagggagggtgagacttccatatgacttccatcagagtctatcctatcctttgggatagggcctaggcccacccccgtgtgtcttggctcagggagtattcctctatgtggaatggtcacccaaagtccacacctatgctagggataggaggtcctgtagacttccaagatctcctcactgaaacccacattcctggggtctggattagtcccatgctggtatcccagctatcagtctggggaccaagagctccatcaccttaccttttaaaggtgcagattctgcatcctgcagaagagggaaaagggtgtgagattttattaaggtacctgttatgttgtgtgtgtgacttcccagtaaaatttatgttgaagttcagttgcccacgtgagatgattaagaggctatgggacctttaagaggtaattaggttatagggtctccattttcatgaaggaattaataaagtgccataaagtgggttagttatcaggagggcttgtgcagtgggtcagttgctctgttcctcagttctgcacactcacttcctctagccattccatcatgcatggaacagcacatggctctcaaccagattctggagccatgctcttagactctcagcaaagcagaccaaaatacctgtgtctttgtaagaagttaactaatttagcaactttgttatagcaatagcttacttagttcataggtccatttctacttccatgcctggtgattgctaatggacacctggtgtttattattttcattttgctcttagaaatgctgtctttttagtgcagtgagctagattcctttccagcatttgtggtctcttctgctcactttctaatgcttgtctcatgatgccacttccattactccaatggcattgaccctcagtgctttcctttcttgcttgcttgtagacttacttactttatcttatgtgttgactgtttaacatgcatgcgcaccacttgcatgcctggtgcctgcaaaggtcagaagaggccactggatcccttggaactggagttatggatggttgtaagctagtatgtgggtgctgggaactaaaccctgggcctcttcaagagcagtcggtgttcttaaccactcagccatccttcaacagcaagtgctcttaaccactgagcgagccatctctccagcccctcctctagtggtttctttctttctttctctctttcttccttttttaaagattttatttttattatgtatacatctgcttccaagtatatctgcacaccagaagagtgcaccagatctcataagggatggttgtgagccaccctgtggttgctgggaattgaactcaggacctctggaagagcagacagtgctcttacctctgagccatctctccagccccctctagtggtttcttaaactttttttttaaatacatggtctctgtggcgcagtctagccttgaattcagacagtgatccccttgtttcagccacccagatgcagtgattacaagcctgcgtcactatttcttgaagttctcatgggcttctttcgtgtagctgctctcttttcattcgtgtttgcttgaaaaacacccacttcaaagtcccacccccatcctgccatgtacaaaccccattcaaagtcattaccaccctagccgcttctttctagtacttacactacaagcgtcccactaggactggaagctgtaccaaaacaataaggtttgacttacatgattgttcctgacttgctgataaaatgagtgacaatgtatttagaaataggcctccagaaacagatttcacactttgtgtctgtttaaaggggttcttgaactatcacctttaagctcgatttcatcattgtacagtcatttcacagtcaatgttttttggctgtgtcagccctgtgctgagttctggggtaaacatggcagtttctgcatttgtgcagctcagatgtggatgcagtaaaccacagaaggaacaagccacctgtgacctgtgtatcacagcatcaatagaatggaagtaatcccatttgcttctccttcccaggatccacacctgcaggacggcacccatctctgtgattcaaatctttatcacaaacccagttccctttttggacatttcccaagaggcaactgcttaatctgcttgctgaaagtgaagtcattaagacccaatcaggaaggctgcagatgttgccttcaagctgtgcagctttccagccgcttttgcacagagctcagatctaggatcagaaactatcttccagctaggacacaaatcccagctttagcccttaccagctggatggtctggtattcagtggttctcaaccttcctaatgcttcgaccctttagtacagatccttatgttgtgctgacccccaaccataaaattacttgctacttcataactgtaattttgctaccattatgaatcacaatgtaaatatatgatatgcaggatatgtgatgtttgactctaaagggctcaagatccacaggttgagaacagctggtctagatggccattttgccagtacaattacagttggccattctgtttcaaaaggctagaggatcaaagtagaaaagttttgtatggggctggaaatatggctcatggcacacatacacacaggcaaaacaacaatatgcatgtaaatcttttttaaaaagtaaattcttggccgggtgttggtggcgcacgcctttaatcccagcactcaggaggcagaggcaggcggatctctgtgagttcgagactaacctggcctacaagagctagttccaggatagcctccaaagccacagagaaaccttgtctcaaaaaacaaaaaacaaaaacaaaaacaaaaaagaaacaaagtatattctctctacattataaaataactacagaaatgtaaagttgtatagccttatccttgcttattcttcatgggaaatggtggcagacaagaaatatttgaagattgaaacttattgacttgaaactgttagcacagtgggacacacaaccataaacagggtggctctctttgcactgatacagaaagatggccatagtatattaaatgtaaatgcaaaatgtctctaattgatatctttgtgtgcgtgcgtatttatggtagaatcacttcaagggcaatccactaaattcttactaaaggtgtgcaccacacttggctcaagatgcttttttttaagattctttttttttccttttcatttctgtctttttaaaagattttatttattatgtatacaacattctgcttccatgtatatctgcacaccagaagagggcaccagatctcatagtggatggttgtgagctaccatgtggttgctgggaattgaactcaggacctctggaagagcagtcagtgctcttaacctctgagccatctctccagccccaagatgctttttttttattagcatatattccacacaaaaattggttgcattttttttggggggaatttcgagacagggtttctctgtggctttggaggctggactggaactagctcttgtagaccaggctggtcttgaactcacagagatctgcctgcctctgcctcccaagtgctgggattaaaggcatgcgccaccactgcctggctcttggttgcatttttatacttgtgtgttatctatttggatcacattcatccctccattattctctgcctccttccgattctcactaaccccctcctcttcccaacttgtcacccttttacttttctgtctgtgcatgtgagactcagaaagtctcatggtttcttctaggaatataggtagggtttgtttacagaagcatggacactttactactgacgacaccctgtcaaccattagctgcacataagccacagggtgtgagggggcccatgagcccctccctcttccataacagggtgctgatctaactttgcacaagtgatcacagatgctatgagttcaagattccaatcgtcatatcatacctacaagtcagtattctaccttgttccccctgctacttctgtctcttacattcttctcaccccttctttcaatagtgccccaagagttgtaaggagtgataaagattcccagtttatggacattcatcatttcctctcagtactttgacttgttaagagtctctgaagtcaccactgaccactgctaaaaagtttctcaggctggagagatggctcagtggttaagaacactagagatcctgagtataattcccagtaaccacatagtggctcacaaccatctgtaatgaaatctgatgccctcttctgggctgcaggataggtgcaggcagaacactgtacacataataaataataaatcttaaaaaaagttataggcataagcacatcgctgcttagaaggcaacttgatggatatatcatacctattagcaagacaacagcagtagttttctgccttaggcttatgacctccccagtcatggacttttttttttttttttttttttccccaagacagggtttctctgtggctttggaggctgtcctggaactagctcttgtagagcaggctggcctcgagctcagagatccgcctgcctctgcctccaagtgctgggattaaaggcgtgagctaccaatgcccagctcagtcatgggcttttgactaggtttacagtatcagatgtgaatattctcttgtggtgcaagcaccaatcccatgtagaaagtggttggttatccccataacacacctgccactattgtaccagtgggctcagctggcctatctggtctgtatagttgtagcaatggtccacagctgaataagactactgatgacagttctcatcagcttgcatagcatcttccagcactgtaagatctagctaacacatatgaaatttccagcttgatttctttatgtcctgagaccaaagcccttcagaaatagtgtcttactacctagttctggtggcaaccaacagaggtggcaattgactgttttggggccttagggaactccctcaccaatagatcatgaggtagttcacccatggcactgggattttcatttgatgacctgtaacttttagttttattttgactggcttatcaagtatcagatgttttttcctgtattgctatatatcccaggctggccatgaattcattctgctgctgaggatgacactgaacttctgatttctcgccccatctccccagggctgggagtgcccagttttatgcagtattagggatcaaacccagggatttgtgtatgctgagttaggagtatcgccagcatttcttgttcttcaaactgatagaatctaagcaattttaaggatgcaatattcacaattggcaaaaacaaaacaaaacaaaaaaaaaccccacatattattcatcacttagttttcctcttctacatactttggagacctcaagtccaattttggttagcatcactttggagaatgaattcagctaaattgggagcttggagagtcacgttgaataatgaacaagttcctctgaacagccttccttgcaacacttgcaaactaaaaagtaaggcagaggctgtcatgagacctgcaagctattcataactgtgtctctaatgcaagaggcaagaaagtgaaaataatgctattagatcatttgaagatgctgagttgtcagattaaaggcttgcttgctgaaatctgacctactcatttctcagagatcacaatgccaatctacttaatcatagcttgaaggaaaagcctaagaccactttggcctttccacacagaaaacctcactgtgttccccaacgtagaaattcataaaccatgtcttgtctgcctaatgtttaagaaggcaacttcagtgattcaatagctacagttttggaaaaaaatgcaacttagggtactatgggagcttactaagtacgtccagcttggacttattaaagcgggtctttgacctttcagctggtatgttctttttactgtatttcaccatgtagcaatttttctggggctgaagagatgtctcagtggttaacagcgcttgctctttcagaggacttgggttcagatcccagcacccagcacccagcatggtggctcacaatcatctgtaactacttcagggtatctggcaccttttctgacttctgcaagcactatcccacctgcggttgcacacacatttgcagacacaattcataaatatcttgatgccagtttttttttttttttttggttttttgagacagggtttctctgtgtagctttggagcctatcctggcactcgctctggagaccaggctgacctcgaactcagagatccacctgcctctgcctcccgagtgctgggattaaaggcatgcgccaccaacgcccggcttgatgccagtttttaactgttataccatacattcttatcacctaatataattgactacattctttattcttaggtttaaaacacacttttaaagtaaataggacattctctgggtgtttactattagtcaacccatgctgcaagcaaggcctggctcctcctagaacttcagtttccgggtctctaagttgggaagtattgcatactatgttctctcactggacactttgactttagccttgtggatcctttctcaaggtcatccacctaacaacagggtttatgctaaagttaagactacatctctcatttcgttcagcaactggtggaaacagatgaggagacccacagccaagcactgggttgaactcagggaatcctgataaagagaggaaggccagaatccgcttacctgggttcacagttcacacagactgaaccaacaaccaggaaacctccatgggactgacctagtccctctccatatatgtgagagttgtacagtttcgtcttcttgtgggtctcctaacagtggagtgggggctgtctctctttggctgacttttggtattctactcctcatactgggttgccttaatacaaggcaaggtgttcagtcttactataacttgatataccatgatttgtcaatatccacaggcctgccattttctgaatagaaatggtggagggttggatgaggtggggagaggcagaaggaaggttggggaaggggctgggaggaaaggggagaggagaaacttcagtcagaatgtaaaacaaatagattgaaacaaaaaatctctaggggtggtggctcatgcccttaatcccagcagtcaagaggcagaggcaggcggaccactgagagtttgtggacagcctggtctacacagtgcgttccaggagagccagggcttgacagagaaatcctttctgaaaaacaataacaacaacaacaaaaaaacctctcacaatatattctactcttaataacagtaacattccacctagtagtctgttcttagatccaacttactttcccactgttcttcctttaaaaaaaaaaaagtctatgtatgggtgctttgtctgtatgtaccttggcaccatgcctttatatccacagaaatcagaagaggcatcagatcctgtggagttatagacggctataaactgacaatgtgggtgatgagaattgaactcgggtcctctggaagaacagcaagtgactgaaccatctctccatttcttgtcctcttctgctgttctttttttggttttttagagacagggtttgtctgtgtagctttggagcctatcctggcactctagctggagaccaggctggcctcaaactcaagagagattggcctgcctctgcctcccgagtgctgggattaaaggcgtacaacaccaacgcccggcccttctgctgttctttactagtttgctgaatcttcaatcttgctcactttaataaaaatgaatgatcctcctgcttcacattcctgcatgctagaaatacaggtatgtgtctagcaagattttgttttgttttaaaagattaaacaaagctacagggctagagctaagaaaaatacaaaccacgaggttagctaaatgcttaagggagctacctaagcccttaaaagcaaggagagatgggcatctatctagaagtacgtgaatgtgttcagggcaaagtggtatttctccaatatcaagagttttgctaaggaggaccccaagagaagaacacatgatccctagaaggggagggagacaagaacccctgagcaaactgggagcaccggggggggggtggagaataggagagatcaggaggactgagacaggggaggaatagaggagggcaagaaaggagataccttgatagatgagccagtatgtttagagaaaggtctggcaccggggaaatgttcggggatccacagggatgaccccaactaagaatctaggcagtggtggagaggcttcctttgatgcccttcccctataattggttgccatcctagagccttcatccagtatttgatagaagcagaagcagacactcacagctaagcactgagccatactcctggaatccagttgccgagagggaggagggatgagcaaaggagccaagatggtgctggagaaacccacagaaacaattgacctgatctagtgagagcatggagaccctcgtcgtaaagctggggaaccagagttggacctaaccaagccctctgaatgtgggtgccaggtaggaggcctaggcagtctatgggaactctaacagtggagccagtgtttatccctagtgcacaaatggacttgggagcccattccctatggagggatactattgcagcccagatacagcaaggagggcctaggcccactcccaaatgatgtgaaagactttgatggtcccctgtggagggcctcactatccttggggagtgggttgggggaggtgggaggggcattcgagggtgagggaatggggggattgatatgtaaaataagagtgcttctaaaaaaaagttttgctcgtgaacccaagtatgatggagaacccattaaacaaattcagaaacaaaaaagtatacaagtacacgtttttcaagtatacaatttgtttttatttacaataccctataaaaatgtaaatttagaaacttttatttttattaattagaactgaacaaaaagcacaataaggaagaaaaaataatcaagtgtttacttgatcaggtgtgaagggaaggtaggaaaggctcagtggagacagtcagcagatggcaaagggaagctaaagactgtcactggggagcagctggtggagcctgaggccacagaatgagaagaaatggagatgagaacaaggacagctggttgtaacggagagctttactgttatacaatacatgtatgtgcaaaatgtttattctctttaaatatcatagcctgtccactgactacattcaaaaaggctagaagagcagaaagtaggatcaggacgggaatataaaataaattcaactactagggagcaaagtcccttatcctggctaactgctgaaggtaagaaagggcaaaggaaagtgtccctaccattcaaacccaggtcccggctgctagtggatagggctcaggcaagactaagcagccaggacagcgttctgctgcagggtagaggagaccaatgagcagagcagcccaagtttagcagccacggctacatttggaggcttctacccaagacactaaatgaaaatggggaagagaagcagaagcatggcttacagaagtcacgtcaggaagacagtgcacgtgtgcaaaagctacactgcagaagcaggctctacgtgaggctcatcttgggtactcttgaatgcacttgagggacaggctcaagcacgctgtagtcatcacaggaaaaggcttaactgtgtgtgtgctgtttccattacagtggtcaggaacaaagaaaatacagatagggagaaagatacttctcagcttagagctgggcatcagccaattaacaagtttgatttaatgtaatgtgctgtgtaccctgttatttatatattaaaaaagtataatccaccaaattacaagatggaacagaaacagactaaaaatgtatcagctggtttatttttagaggtatatgctaactaaatatttttcaaattaaaactcattctttaaggaccctttggggccaggcgatggtggtacacacctttaagcccagcactcgggaggcaaaggcaggctctgtgagttcgaggccagcctggtctacaaaatgagttccaggacagcctccaaaaccatagagaaaccctgtctcaaaaaaccaagaaaaaaaaaaaaaaggggggggggaaccctttggagaccacatgaatgcatgtgtaggggtgtgtgtatatttacctataccttataccttgacttctacttagttctggctctcctatggtcatactaataaggaaagatgaaaaaagacttcaatgggtggagggaacctttggcagactacaacctactttgaactgtaatagtggtgatgggataaagggatattatatttgtgtctctagggcaaagaaaatgcaaaattgagaagaattgagtaaaagtaggacatgcaaagtgtaacacagaagataaaagaaaccagcagaagtatcagagcagtggggaaatatctggcattcagagataacctctgaaaacaggttgctcccacaagactttcctttgggtcataagctacctcccctccctcattaagaacactccattggtgatggcagcagtgcaggtggcagccaacaggaggtacaggacacactggagagcttttatcgtatcccctgaaccagcctacggatatgaagagaaagacaactttttgtataagtaagttaaaataggatgaatcttctgcattcacgtcacatctttacaagaattctcataataaaagaccctaggtatttctgttctctcagcttctgtcattttctggggcactgctgcacaaaatacagtgatttggtttagcacacatgcaaacatttaatggaggtctcaatctcttactcccattcagctccatcccccccacagtatgatgtctaaaataaccaaggaagaatgtatttggaacttactgtagttttgtctccagcaagttcagtttctgccggtcaacatagcgagaaaaaagggacactagatttgtgggtatagagattggcttagccagggctgcttgggggatctgtagaagttctcgggttgccatgaacatcacctccgtcctgacagagaaaacccaaaacaatatgagaagcagaaggggaagagaaaggagaggaaagactacttaaaagaatttaaaatagaagataaacaattagtactgaccattggttattttgcgttgattctatagcaggatctgaactctgtaggtcttctccacggcttagaaggattaggagcagtgacaagccaaactgtaagagaggccagatggaatcaaattttaacaatgtacctaagaggctggagagacagctcagtggttaagacatttgtttttttgtagaggatcaaggtactgttcccagaaactacataatggctcacacccatccactgatatctacagggtgtacacacagacaaaacattaatacacaaaaaacaaatctagccaggccatggtagcgcatgccttcaatcccagcacactggaggtagtgggaggaggatctctgtgagtttgaggccagcctgttctacagagtgagttccaggactgtttcagagaaaccctgtcttgaaaaacaaacccaaccaagcaaccaaccaaaaaaacctaaaagcaacaacagcaaaatccaaaacaatacatctaaacctcttacacctcagttgatgggacccaggaactgatgggaatggctctacatctaagtttttgtatagccaggtggagggggtcaggcaagcctggaattagaggtatgtatttcctctaagatgttgtttctggcacagcagacacaaagcacagaaagtcctctctttaccctattctgttttgaaaagattttctccctagtcatggataatctgtgatttggcatttcttttatttttaagaatcaaagcagattaaaaatgaaagtctaagttcatggaaaattagaagaaaaagcaagtaaaattattttgtaaagaaaaaagatagtaagctgggcgttggtaagctgggcgttggtgaaacacgcctttaagcccagcagcactcaggaggcagagacaggcggatctctgcaagttgaaggccagcctggtctacagagccagttccaggacaggctccaaaacaatacagagaaaccctggctgggaaaaaaaaaaaaaaaaaaaaaagatagtaagaactacatggaacccaaagtggtggtgtacactttttattccagcactggaggcagaggcaggcagatctctgtgaatctgaggccagcctggtctatagagtgagttccagggcagccacggctgttacactacaaggggctcagttgtagcattttttcctagaatgcacaaggctccaggtctaatcaccaccaccatataaatttggtgtgatggtgcatacctaaaacctagcattcaggaagatcaaaagtccaatgtcagccgggtgtcagtggcgcacgcctttaatcccagcacttgggaggcagaggcaggtagatctctgtgagttcgaggccagcctggtctccagagagtgctaggataagctccaaagctacaaagagaaaccctgtctcgaaaaaccaaaaccaaaccaaaccaaaaccaaaacaaacaaaaaaatcaaaacccccccacaaaagtccaatgtcatccttggctgtgcagagggttaggggcctgggatacatgacactgcctcaaaaagcaaaacaaaacacattaacaaaaatgaaaatacacacagggcaaacaaaataatcaaagctcaaaagaaataaaacaacaaaaaaccaccaacaataaataaacaactccgggggctaggaagatagctcagttggtaaagttcttgagcttagattccacaaaataacaaaaagctacgtatggtggtgtgtgcctgtgactccagctctgggagatagagcctggcagattctgaagtacactggccggccacccgaagccaaatcaatgaacttcaagtgtagtcagaacttatctcaaaaagcaaaggtggagaataatcaaggaaagacacctgttgttaacctctggccatatggcctctgcatgcacaccactaaaagggcaagtgtgtacacacagtatattcttatctgaaattgttaataggcatttaaaaaaaaatcaacaacatgacttttttgtttcgccatgaccggcacaaaataaaacacttaaggggcatcaaataaaaatatcaacagcactaggttaaatgtgtaaatcatatctataatggatcataaatagatgtatattttgggatttcattctactttcctgggtttatattatagaggataatccccccacaaaatttcccttcatgctatttgcaagcaaattttcatcagctcaggatctcgtatgacttcctggttttttactgctctttccaaattaagagtgactaagtaacaggaagaccatgactggtcacttgagagcctccctatatcctgagggatacaggcatgcttttctatctctgatggcctgttactgttggcagataaaaggaggaagaggtcctgagccttcacctctattgcttgtcatggccctaaacaagcgcctactatctaccaggtatcatctaaataccagaacactgggcaaagcctgcacccacacttgcataacacagatcaggaaaccggctgagcaaatactcaggatcataatgctggaaaagggcaggcaagctgacatggcctgtttagaaactcacgatcctccttccttattaggtttcctctaaggggctttaaactaaaaaagaaaaaaaagctccccccccctttttttttggaggtaggggttatgccctggaattcaatatgtaaactaggctggctttgaactcacataggcccggctggcctgagtggtggggttacacacaagtgcaccaagttttgccttaatctttggatctttaatatgacataactgaaagctgtatgcatccttcctgcagctaggtatgccatgtgactaaaccctggtcactgctactcatcagaagcttgctagaatttcttgggaaaagccctaacaaagaagacaggtagttaatctacactttaataatccatacccagctttgttcttcatgtcaagacagttttaattttcagaactaacctgaagcagggacctcatgagtatgggaatctacagttaaagaggaccggaataattgtaaaaaagactggatgcttgatgccccaaattccataaagctacagtagtcctaattttcctaagtcaatatagatgccacataagttaaggacactaacggacaagacaaccttgttctggagcacagcagtgaggtgaggattggagggtgctggtgcagttgcactttgaggtaggttcattagctgttgcagaaggctggtgacagtcactgaaggaagatgatagaggagaagagagaagggactcagtaagcatggcagcacctacaaaacaaacaagaacgttacactctaccaactgttccttcacttacatcccactggtggctgtggctagcaggatgctcaccacatacaaaatcatgatattactgtgtgccagcacatttggttgtaatgaaaaggcaggatgagttactgacccagcacttactacaaatgattgatatacttttggtatcattatgaactcattaaaggaaatctaattcagtctactgctgtaattttcctttctgatgttaagtataccacttttggaaaacaggagtcccctcaaattggtttatgcatccctaataacctattagttcccttgcctctggtttaagatgaggattatatgtacttcttacacctggatccagttattattgcaagaaaaatcgattctagagacatggtagattactttttaatttacatatattaacaactaagcacatgcatgtatacttacatatgtatacatacacacaaacagagacaaagagggggaggagagagaatgaactacaactctacaaacacacatttttaggctggcctcaagtatggcaaccctcccgccttagcctccctagtgtggggaaatcaggtgtgagttaccacatgcaacttttctacatagttaactaagtgttctttactagcaagtaagccccatgaagatacttttgtattcctagctttatttctgtgatataaaacagtgcctgatatgcagatgtattcagtaagtatctgccaagtgttaagattcttccaaacctgcttgcatcgtgagtttctatgagaccatgattgacaagagtgtccactgcttcattctctttggcatttatgctttaaaatgggcatgcccttttactctggccttttattctctaggataaatttcaaatctttaaaattttcctccatcccatttttcattcttggagtctcttaaaaatgtactggttagctgggtggtggtggcggtgcacaactttaatcccagcactcaggaggcaaaggcaggcggattcctgtgagtttgagaccagcctcctggtctacaagagcgagttccaggactgtctccaaagccacagagaaaccctgtcttaaaaaaaacaaagtactggttttggggctagagagatagctcagctgttaagaacacctgttgcttttatagaggacccagattgaattcccagcacccacatggtggctcacaaaccctaactacagctgtaggggatccaatgccctattctgaactccatggatatcaatcatgcacatagtgcacagacacacatgcaaacgattcataagtaaaatttaaaaaataaaataaaaaatgtcatttgtttcattctgttgcatttttctaatgagacctaaatttttcattcctttctataaaaatcaacatctcaaaggctacaatagtaattttcagctcttttgtgttttaaggtatacaggcatgtcttctgcacagaaactgatgggggatgtccttctctatgctgtgaatatgtttctctcattggttggtgattaaagcgggtttggtcaatggacagcaggatgtaactaggtgggggctaacagactaggagaattctgggaagaggaacgcagggagtgagttacaagggagttgccatggagctaccgggaagataggatgcctgggcattctatggtaagccaagactacctggagatacatagattaatagaaacgggttaataatcaagagtgctagccaataagaagcccgagccatcagcctaacagtttataattaatataaacctctgtgtgttcatttgggactaatggaatgcaggaccaagagggacagaaacttcggttcatagcagttactactcaatttgtagtcaactgcaatgtttccttacaagcatctcactattctgaatcccatactcactaatactatttctttagcaatttcctgtcttcaacttgaaaaagtacaagaaaatttgctaatctttgaaaagctattgcaaggataagcagagatcttttaacatttacctgtgggacaccattcaaccaaacctctaggctaacatgaagctactgacaatggagcagggagggatagtttacatccacaaaagtaaccaaaagccaaagttttccaacttgagaagcatagtaagagttgccctacatggtgtgtacctcatcttgtgcgtccttcttgataaggaaagggaggttcctggcagttgccataagaatgtcagctgcttgctctgtggagaggaaagggagaatgcgggcaaccattctcttcccttttcggatacacatgatctgtacaaagtggtcatcgcttggcctgcaagaagaatgccacctaatgtcaacaagggcaatacagaaaactctcatgtttaaaaaaatatgcaaccctatcttcacaaccatctgtgctatcaatattgaagattactctctagttccaaccaaataataaaaggtaaaatattaagttttacaaatatggaaaattatttcccatactctatgtaaaaatgtgatcaaatttgatttaagtaaaaattaaatggtaacttataagtgttaacaaggcacatagaatttatgtggttttgtaatttgacttttttttactttcccttcccaaactggagaattgagctcacagcctcctgtatgctagccaagtgctctcccactaatctagttatctccaacttctgttaacctcttaaacacttttctctatcaaaaaatatgcttcagttaaatgcttttggtggttacataacatgcctatctatggataaaccacatttatcagaccaacagcacaaaagtgtgctgtaaagtagtctattcttatgttcctatcaattctggcccaggagaatctgagcgaagggaaaggagctgtcagtagatgtagtcctcttgcattacatatctgggatttataggacattatctcaactaggtttgcatcagacaatgagcagtagaaaaatgacacagaaagagataacatcttcactgcaagccgggcgttggtggcgcccacctttaatcccagcactcgggaggcagaggcaggcagatctctgtgagttcaaggccagcctggtctccagagccagtgccaggataggctccaaagctacacagagaaaccctgtctcaaaaaaacaacaacaaaaatcttcactgcaagatgtactggcttccacatacacactctatagaaatcccaagaaagcacaaatgctggtaagtgacattttagcagggaagtaaatacataaagattacaaagttgaacacactagtaatcatactccagataatgtcccctcaaaaccaaaatccagcacaatccaagtagacactgaatatatactgctgaataaatgaatccaagcaataatttaaaaggattatggaatgttttacatgaaatagcacccaagtctgaacaaaaagacagacagtagtgtggtgtggtggcccatagttttaatagcaacatttggaaggcaattggatttctgagaattcaagatcagccagggctacacagtgtgcctctgtctcaaaacaaaaacaataaaacccaagaaagatggatgctaagttaaggaaatggtaggagagggtagaccataatcccaagtacatagagtttagtggcaatggaaggggtctcccatttccttcaagtgcacaatgcttacctttcttgtccaggcaatttgcccctcaggttgtcatacatgctacagattttgtgctttctttcatccaccagggcaggccgctcttcttctagacttaggagatagcgcctttcataatcctccacatcaaggagtaaactataggtctaggggagagacaaaaacagaacaggctaggtcaggaccacggagtattagatactcatcttcacagtttagggataacaaaaataaaagtacaaattctaacaaaactggctttttaaaaaggtgcttgattaaatgcagggaaatatggtgaaataataatccttcaagcatcattctttctctctcttggactgatagtcaggtagtaataatagtgaagtaattatgttttccaaatttcctagcagcaatattaggctgaaacacccaactttcataacaatgccaccagggtcaccttccagtagtgagtgagagtgagtgtgagtgtgtgtgtaaacagaggctagagcttgactgtcacatgttttccttcatctttcagtgctttctgtactgacacagcatctcccacctgttgccaattaggctcaaccaaataaccaagttgctccaaggatcctgtttctgccccgagaactgggagggttgtcatacctgtctggcatttatgtggatgctaaggatgcaaactctgttcctcaaacttacatacacagcaaacattttaccatcttctctagccctgataatctttgagatacattctcactatatagctcttctggaatttactatctatgtagtcctcacattcagaaactgcctgtgattaaaatctaccacactggattactgataaatattttgctaaccaggcaatttttctgttttcttttctttttttttttttgagacaggttttcagtgtagccctggctgtcctgaaactagctttgtagatcaggctggcctcaaactgcctctgcatcccaagtgctgggattaaagggatatacactcacaacaaaaggccaggcaagacttttcttaaaagatgtatgtatgtatgtatgtacgtatgtacgtacgtacattggggattttgcccacacatatatctgtgtgaggatgccagattccctggaactgtagttacagacagttgtgagcagccatgtgggtcctgggaactgaacccagggtactttgaaagaacagtaggtgctcttaacctctgagccatctctccagtacgatatggcaatattttaaagttaacttgactatcggtgtcagccagtcatctagcactttgcacgtattcaattcatttgcaaacgtaatcccaaaacaaaactactacaatcatgaagaaactgaggacagcataaaagattaaataactcagcctcaggtttatagactcagaaaagggatcgtttaagcttgtgttctaaactgctgtgctaagtagtggagaatggtatcatgtatgtagtattgcactgtgctatgtgaacttacagactgtctatatgtaccatctcattttccttagcacacaaggaatgcctaataaatgttataaaactaaattagttcatgtaacaacaaaacctttactactatttttactggctcaagataaattgggttgatgagattgctcagtgggtagtgtttgctgtcaaatctgacagctgagttatactcatggaggccatgtgttgaaaggagccacacgttgtctccctcaagttatcatctgacttccacacacaagttgcagcagacaccaacacccacacataagataaataaatgaatatatatatataaaaggtgacctgctggaggggcgttagtggcacacgcctttaatcctagcattcaggaggcagaggcaggcagatctctgtgagttcgaggccagcccggtctacagagcaagtgtcaggataggctccaaagctacacagagaaacactgtctttaaaaacaaaaacagaaacaaacaaacaaaaaaggtgacctgctcaaagataactattatctattagttgaacaatggagaataaaacctcagtgtagtgttctttccagggttccataggcaaggtgtagcacaatcatttctggaatgctctggtaaacaacaagcactaaacaaaaatcaattcttaggtaatgtaagagatagcaagcgggccagtgagatgactcagcaggtaaggcacctccccccaagcatgacaatctgagttagtacctcagaacccacatggtagaaggcaaaaacccacccctgtatacaagatgtcctctggcatgcatgaacaatgccaccttcaatcataaattgtaattatgtaaaaagaaaatcaattaaaaaaaaaaatcaaagaacactgattgccaggcagtggtggtgcacgccattaatcccagcacttgggaggcagaagcaagtggatctctgtgagtttgaagcaggccagcctggtttgcagagctagttgtatggcagctaaggctattacacagagaaaccctgtctcaaacaaaacaaaacaaaacaaaacaaacaaaagaacactgatttactgctcactcttctacttcttagatacacatacatttgctagctttttaaaactaaatataggaataaattctattcttactttctcaattatgacaagggtttttcttctcttgtcccgaacttgtttttcttttgtttcctaaaaaagaaaaaaggttattcagtataaatgctttacctatactgagaacattttactaagaatgcacctttatgttcattccttaaaaagtttataatccaaaataacaacagtatgaaacaaaggccattgattgatcagctcacaaatcattaaactaaactaataaatctaaaaacacatactgttttaagcagcaaactggagaaaaacagacgatacttgcagccagaagtatcagatccaaagactcttgctattgcaggccctggctggctgcctgaaaggcattagggccagcaagattgctcaattggtaaatagtgcttgctatatggatgtaaccaaccatctgtatttaatccctggagtacctgttgcaaggagagtaactctctagaaaattgtcctctgacttccaaaagtacaccatggcatatgtgacacacatacttttttttttttattttgggttgtgagcctagcctttaatggctgagccatctctccagtccacttttttttttttttttaaatgaaggtattatatttcagcatatgtgtgaaaaaccaaaaagtcaggacacaacgggttagtttagattatagactattccaccatgtcgcatttcattccaatgactgcaaaatgaataccccattagctggcacttacgtcatcctcactccgagatgtcacaacagcatcaatcatttttcgaggattgttcacactagagacagtaagcttacccaaagagccctcaaactgcactgcaaggacaaaaaaaaaaaaaaagactccaataaagacttggaatagggcagacagcattcaaaaagcctttctttgttctgtacccatggtttagtaattcaccacaagaatgctatatagtgaagcaaccgcccctctcccccattttaaaagatttatttacttatcatgtaagcaaaggacccatgagttcatctgtcaggctactcttctctccacatataattatctcatttatcaaaacagcagtgctccaaatttctcttaataaggggctgggaccttaccaggcttataagcatgctccagtttggccacctggggggtgatgagcttggtacgctccttcttaggaccatcaccttgtatttcttcagcagctgacattttctccagtttttcaaagtaattctaccacaagagaagacagttcacattgcaaagcaaatacagaccacccgggttcgtcacactaataacactatagtagtaagttgtaataaaactaggactctagaaatacactgatgtctagtttttgttagttttaactttatttcatttatgttgtgggataatctttttgtacactgtgaagatgtgtgtttgccaaagcaccttctgattggtttaataaagagctgaatggcccatagctaagcaggagaggataggcagtatttctgggaagagagaggaagaggagatgaatctagatgcaaggagaagccagaaacatgcggaacaagtcagacacgcagaatggaagagaggtaaaagccacgtggcagaaaacagattaacagaagcaggctaatctgagctataagagctagttgggaaaaacctaagctaaaggccaagctttcataattaataagtttctgtgtcattatttgctggctggtggtccaagaatgagaaaacttactacatatttacttttggttttttgagacagggcttctgtgtaagagctctggttgttctgaaattcactctgtagaccaggctgtcctcgaatttagagatccacctgcctctgcctccaaatgctgggattaaaagcgttcactaccaccacaggcttttttatttttatttttcaatgtgccctaattgtcctagaactcactatgtataccaggctatccttgaaatcagatatcttcctgtttctacctccacaatgctgggattaaaggcatacacacccatccttggctttattaaaaaccaatctatgaattatgggtatacctcaacaacaggttggtagcatgtttacttgtttattttttgcttttcgagatagggtttctctgtggctttggaggctgtcctggaactagctcttatagaccagggtggtctctaactcagagatctgcctgcctctgcctcctgagtgctgggattaaaggcgtgtgccaccactgcctggccagtagcattttatagtatgatagtatgtttatagtatgttcaaggcccagtaccacaaaacctgacacatatgctcaaatcccttagtctttaaaaacattaactggcagccaggcgttggtggcgcacgcctttaatcccagcactcaggaggcagaggcaggcgaatctctgtaagttcgaggaaatcctggtctatagagcgagttccaggacaaccaaaaaaataaaaaaaataaaaataaaaataaaaacaataacaacaacaaaaaaacccattaactggctggtaaaatggctcagtgggcaaaggcacttgccacttaagcatgatgactgcttaataggtaggtacctcagacactgctccagggtatggtggaggagaaggtctattgtagataaaaggcagagacagggacatctgggaaagtccagagggggcatgatgctgaaccatgtgagaggcagaggggaagagagaggggagaaaagaggaccaagtacagcagccaagaggaaaaagacagaaaaaaaaaaaaaaggtgggaaagagcctcaggaagaagggcagtccaagtcctgggctagagtgttctgggaggggtggggattttgggaggaataaagggtggagtatgatagtcaaaccactcacacccagtaacaagtagggaagaaaggattttgagagaaccaggtacactctgatatagtaaacaggcaccttggccttttttgtcctggggtttgaggcttaataatggcctaaattcaatttctgggatccacctggtgaaatgaaaaaactaattccccttgatatccacatgtggaccttaagagctgttctgtactgtccacaaaataaatgtttttaaaaggaatttttaaaaatgtgaattaaagaagatgtctttaaaagatagactgctaacattcttttctttcgtttttttggtgtgtatggggtcctaggaattgaagcttgggattgcacatgctaaacaagtactctcccacaagctacatccctagcccacccctccccccaaccaatattcttaattggaagaactagcttattaatgccaaaatgataatatcaatctgagcacatacagcttgacactatcgagtgttaaaaaacagacagaatctgcttaatcaatttgtattcactggacagtatctcaatagaaaattctattactagcataagcagacaagctgttctcaaatcaagcactggctatttacctggtaatagaaatcatccaggtagggatcagtgctctgcaactgcatcatctggattttagaaacccaatccttttcccgctgcagcatgagattagcatatggatccttccggagatgatcttgatgattggcccggtgacttcctctgtctccagcaccattgagattccgatgctgactgaaaggcaagcacaggctgcatttaggccaagtcagcattagccatacttttcaaaatataggaatataataacactggttcaaaaatattcccctttgcctttgtgaagaaaaacagaactgttccctaacagaatcaaagggcaaaaagctgtgtgatatgtaataatcacagaaataaaactaagacttgagtaccttcccatttgttaagcacctccataacatgacttttgtgcaaattataaccacacagaggaggtagagtgcttttcttcacttaagacaatacactgaggccaggagaaatcaaagctattcagcaggtgataagattgaaaactggtcaatctgatcctgaagtctgtataatttttctttaactcaatgaaaatcatcttaatgtatctagctcaagcaaaatattgtaagaaatatttacccattgtccagatttaaaaagtatttggccaatttggttcactttgaagtcacacagccaaccatggtgatacaaacctttatttccagcactcaaggcttactgtggtttgaggccagtcctgtttcaaaaaccagaaccaaaccaaaccaaaccaaaaaccaaaccaaaccaaaaaaccacaggtgggagcttaaaaactgtcacgtgcacgtacaggacagaggagaggatcagatctccggagctggagtgataggtagttatgagctgaatgatggtgttgctgggaaatgaatgctggtccttttacagcttccttttcaaagaagaatcaccatgccatctttacatggattctcttcaacatgttcgtacttttatagtgcttgttcatctgtctttgaacgtttttttctttcttttctttgattcagggtctctctatgcacacctggttagccttacctcactatgtagttcagactgccctggaactcagagacccatgcctttacctcctcagtgttgggattaaatgcaagagccatcacacttggtttgtctttcagtctttttttttgagacagggtttctctgtgtatccttggctgtcctggaactcactttgtagaccaggttgtccttgaactcacaaagatctgccaacctctgcctcccaaatgctgggatcaaatgtgtatggtaccactaggctttgagtctttttttgttgttgttgttttttagagccagggtttctctgtggctttggaggatgtcctgaactagctcttgtagaccagagatccgcctgctctgcttcctgagtgctgggattaaaggcgtgtgccaccaccaccgcttaggctttgttcttatgcagtattattttgtatgtttttgattacataaatggcaatgggcataattctactccttgtttctttatgtcacaaatgtatcctgggaatactataaagtgaactgagaggatgttgtctagccatgttttttttttttttttttgagacagggtttctctgtgtagctttggagcctatcctggcactcgctctgtagaccaggctggcctcaaactcagagagatccgcctgcctctgcctcccgagtgctgggattaaaggcatgcgctaccaacacctggctgtctagccatgtttttaacttcattatctactgcctaaatcctctccaggagttacatactcagttctcgccccaaataaagtagtaagacacttcaagtattgcttgactaaggatggtaacttctatctagttttaatctttactctgaagtgtgcttgattatctcttcagttttaggaaccacccagtaaattttattctgttgagaactgaatatttgggcatatgtgttttgttagtgctttcacatcttcctcaaaggatttatatttagtggtctattactgcttggcttcttccttttttaggtttttgcctccaattgataaaattacaaccacgtgtcaccaacaacaccttcaaggactgatattttaaatgtattaatacattaatgcagttaaatatgttaatctttctctatatagcttatacttggagttttgtgtgtaagtcaacattggtttcctttttctctcctgcaaaattatagaaatttttgaaggtgagaaggaattatacacagaacaaaaaaacagacattgagaccccttacagctatacctagtttccttaatttatctaggtaaataattacagaatgacttgatatagacactgaaggcagagaggctttatgtaccctgctgtttttggttttcaaagcctgccacagtttggccacacagccagtatatacaaaaatgtgtttacatttatatgaagatgaaataatgtgaagaaaagaattatcattatgctcacataacacctacatttagagctggctgctgtgttttaagattacttctaaactcgaagacaaagaaaaaggcagttaagccgggcggtggtggtgcttgcctttaatcccagcactcgggagtctgaggcagaggcaggcagatctctgttgagttcaagaccagcctggtctacaagatcaagttccaggacagcctccaaagccacatagaaaccctgtcttgaaataccaaaagaaaaaggcagttcagatggtgattataaatttgataagggatataaatgtcagagctcaactttaactatgacttaaggtcaacatgactttacgtcaggagagcgaagagtactcactttctactctgctgctgcctctgatgcaacaggcgccggtgctgtggatgaaggtgagttgtgtctggtctaaacattggggcctgaggtctaagaaaaaaaggaaaatggttcttggttatctcatcttgatgacttcattttaaaaaaggttgtcaatacaggataatgtcaaaggttcactcaagggatttccagagtttattccaactgttatttttaaatttcttggatgactatgaaacaccttcagggttctttcagtggactacttcagtgctttagtagtaagcagtataattttttttgttcctaacagggttaattcatttagcttcaatttttttgtgggaatgacatagaaattttatgtatggtagttattttacatgtcaatctaaccatgatacccaagtttaaccaaactctagtatagacactgttatgaaaacattttatagacatgatttacatttacaatcagttgactttaagaaattgccctccataatctgggaggcccaacagccaaaactgagaagttactcagagaagaaacctgtatcaagatgggaaatgatgttctgctgggtctctagtctaatggctgacatacttcaaggtcaagactgcaatgtgactctttaagtttctagcctactaaatggatttccaatttgccagtcagttcctcggattaaaattaactttttccacttatatgtatcttctattgatgtttctcttcagaacatgaactgacacgatttacataatatgacacaattttaccaaagcagaaaccaagtttatctctttataaaaccagcaactcagctggcactcagatcagctagcttcttggcctttgtttctatctgttactcaactgtggtaattcttcagtcatcagcactgtgcattgtactgcatgaatgttcaaaaaatgggtatgaagtgcaactccagtaaaagtaaaagaagcagttaatttatcaaatgcaaaggaagcatgatactccggagaacagtgtagaaactgaagactcaagcagttctctgacaacctggggatccaggaactatacttcttagcaagtatcacaagagttttatatcataaaactaaatgagaaatgaaactttcacactataaaactaaaatggacttggctgacaatgatcaagaagcatgttttgtataccttaagttttgcaggtgaggtcctgggccaggaggatgctgttggggagggggtgtagcagggggtggagcactaaagaaggcacggaagcctggtgctgggggaagtatctgtccaactcgcccttgtagcaacttaggattcatggcagccagggggctaccaacaaatccagggactcgtgcaaactggctgggagacatacgaccaggctgtagctgcaaagaggaacagatctttaatgtaatagaattagcatttccaacaggccccacttccctttgtgacagggtctcattatgtacttcatgctgtttggaaactccctgtgtagccctggctggtctcaaatacatgatcctaacagaacccctcccaagtgttggtattataggcatgcactaccaaaaaggtaaatactatttccattaatatctccacttgagataacaaagtgggggtgaggtgggagtggggagatgtgtctaacagtgaaagaaaacagtgtcaagcaatgactcttaggatagtaggatcatctttatgggtatggctaactgtaggcttacctgtgctcctccaagaagctgtgctctctgcaggggactgagtacaggaggaacactaggaggaaaagggtggcccagaagggacgaattctaaggacacagaaaagagaaattatgttcatattatggatcaagcaaatcaataaattaagcaaactcaatataaatttagcataaagttagatgcaaaaacttccttgtatcagaaaagaaggctagaaattatgaaagactacttccatagaacaagaaaaagacagcattagaatgaaagacttaagcagctgaaaataggaatgaacacagattctttgtgtgcttttccttttgttgagagagagtattgctaagtagctcaagctggtagcctgaaactcactcgctatgtagaccaggcttgcctggaattaaggatccttctgcctcagtctactgagtgctaggactacaggcatatacagtaattcccagtcgagcaaagaatcttaaagtggcacaaaacagtaaatttttgtcctttgatcttgggaccacaaaccccagaaaacaaggagagattaccagaaattcatataatataggaaatgtcagctctactacatactaaaggtgatcatgaagttcacattaaacatgtgtaaagtgacataccgggacactgcagagctggtttggagacatcctctcaccatagggagcaggataacgtggtggcatcggaggtcgtacatgaacaggcttcggacacagaatctattaagacaaatatacacaactacattgaatgaaatcagtcttttgccttcctacactccctcccctcaagtactggtagagacacagaactcaatgcaaagccctatttctaagcaaattgctctggctatgggttcaaacactgaacctttggtcatttcctctcacaaatcagtttcatcttaactgaggaagatttagctaattctccagtatccccacccttccatgctatctgagggaagtaccagcagacattctgacttgaaaattttctccaagaggatatattttggttatagtgagggacaaggaatgataagaaagctggaggattaactaagtccttattctgaagcctcagtgatatggccgccatgctcagcaatgttgggatacattgtgactccaccatttcttaggatattgagcctaactaggccataccaacaccaccctccccccataccttccaaattggccttccttttcagctgctggtttcaggtggaggaaagtctatggaacaggactgcacaggctctagggaaagcagggatatcttaaaggtaaaaagggatgtggacaatgctgagtgttcccactccccccagctttcagttatctttctgctaatgtacccggcagccagcaaaacacttaaaaaaggatatatgcactaatgtggctaactactctcttctctcccagttaaaaggtatcagaagcagcagcagcaattgtattagggaaatgtgtctcatttgtactaacttcttctctaattggctattctttaatgcctacccacaatgtccaccctcctccctgtatcccaaataattttgcccagattcccaatatcttgggctgtgtacgttaaggaaaggtacctgttggttgaagctgggaacggccatctgcttaggtggggtgcctataggaacggctctaacaggaggacttccaatgacaggtgatgtagaacgccttggtaaagctcgctcagaaaggtctcgatcatcttctgggccctgtgggggcctctgaggcaaggcatattctaatacagacaccgtaggcatttcctaattgaggaagtggttaaaaagcatacagagaaattagctaatttgtaatgttttaatagtctctatagataccaaagataccttgagaaactatcttaatttttatttaattttaactcatatacagtaaaaagtcatcctttagcatacaattctgacttctgataaatatgtaccaattttatcattcccataaaattcctttacattatcctttcataatcagccccttggccttgtgccccaccactgtccaacaatcagggatacctcatctgcagttttgcctagaatttaattagcttaaatcatacactgaagtctaggagctctaacaacgccctttcggcctttaaactgagggctgaagaagggagcatcagcaatacaactgtcaagagctggatgcagcagtcaaggttaacactggtgagtgagacatgcttctatattattacagtatattaataatatgctgtccaggatgataactggagccaacgtatttgcggatacaagccattctacacaaagagaaaatatctaatacctgagcaagtagtggtccacggattcgcctcagaacttcagatccatcccagatgctagaattcagacttctgggttcaggctgccaaaaaaggaaacatacatacacagagtccagaatagtgtggctctcagacttgaaccttgactacttggaaatgagtagtcgcagtgttccagaatacacgattcctcaactttatctacaaaattgctaacatcgggaattatcaacctttggactgttttctttcatgagatagggccttattctgtagcccaagctgtccttgaacttgctaagtagctaggctaactccaacccacagtgatctgcatgcctcagcctccccggtgctgggattttatgcttgagtcaccccacctgccaattaataattttctatggcacatgtaattctgttattaaacagaaaataaatgacaaagctcagtactttaattattaatctgttattatctgagctattgttagttcccaaatcaaagtaacttacttgtaaaaccggcctggtctgcactgccctcatgatagctggatcttctagctcattttcaatcaccatcttactgagcctttctgctagattctcctcatggtcacccaacaagtccatctcatccctctctctattgcctgtttgctcatcagctgccgcaggtagcttctcttccaactcagccaggcgctcatgtgcttcctgccaatcatcatctgtaagacaggtcagttcatataagaaatgtagctcagctgcacagggtggtgcatgtctttaatcccagcacctgggaggcagaggcagaggcaggcagatatctgtgaactctctgtcagcctggcctacttaccaagttccagagcagccagagtagcataatgagaccctatctcaaaaaattctctctctctctttcctatctgtctataacaaaagggtttttatggaatttaagattctgtaagcatacgtggcatttccactattaaaaagaaaaaaaaatattaggaataaagtacaagttctggggtgggggggtctggagaaatggcttagtggataacggtacttgctgtacaatcatgaagactagagttcagatcctagcaccttcataacaagccaggggacctgcatatgcctggcacaccagctccaagggatctgacatctgctttggcctccacacacacaaaagggcacatacctggacacacatgtcatgtggatacacacacacacacacacacacactcccccccccccaagcttttggtcaaaagtttaaagtattaatagtgtttgaatcccagtctgaaactgacttctaaactggtgatagatctttatactatttggggtacatgactagctttgggatttgaagatgtttcaggcaaaacctttatgaaaaagtgaaaaccaatagtactaacacaagactttctcttaaattttaactgccatcttcttctaagccagcagtcctcaatctttgggccacagactctttggcaaacctattttccaaaatatttacattataattctaacaatagcaaaattacagttattaattagcaatgagaataattttatgatttggggtcacaacatggggaactgcattaaagggtcgaagcattaggaagggcgagaaccactcagaatctaagcctttgaatctattaatttcattcggtatttttaaagcttctattgtatgacaaggactgttttaggaacacaggatccaatgtacaccacaaggatgctaccctcacattgccttcattcaaacaggaagacataaagaaaataaacacaatgaataaggaaacgacacactgcattagaagaaaattctttgggaacatggaagaaaagcagcctgaaaatgtaattaaatggatggccaaagacaggccacactgtgaagatgacaacagagccaagatttttttttttttttcattgtcccgtctatcttgtgcctctgggcttttctcttttaaagccaagatttttaactctccctctgtataatgtaccttggagatatatatataatatatacatatgtatatatatatattatatatatgtatatatatattatatatatatatatataaaaacactgattttttccctcattcttcttacgactatatatgatcccattctatcaacatactaattttgcttattgcatagtgaaaaacattctgacgatttaaaactatactgtaggaaacatgatgtatatcttagattcttaagtatttacataggctaactcgttttttttagggtcaggctatgtattcaaaacttactatttatcaaatagaaatgtgtcacatacataacactaatgatccaaaaagcaaagcatgtaggactttcaaattcaagattttggtgtcaaaggatgcaaggcctgctctttcagaactctgtgaaagattttaacacattagtcttcttaatgtgttcttaaaatgatgtggatcatgggggctggagagatggctcagtggttaagagccctggctgctcttccagaggtcctcagttcaattcccagtggctcacaaccatctatcgtgagatctgatgcccttttctggcataaagtcaacagaagacttaaggaaaaatgttataaaattatagatcatgtggggcagtgtggtggtgcatgcctttaatcccagaggcagaggcagaggcagaggcagaggcagaggcagaggcagaggcagaggcagaggcagagggatctctgtgagctggaggctagcctggtctatagagtgaatgttacagagaaaccaaaaaccaaaaccaaactaaaacaaacaaacaaaaacttgtggattactttaaatcactaggaaaagcttggaggaaagagttgtaaacatatccaagcctctaaaagcataggccatctttcatgtgggggtttcagccccttaattaaatgcatggccaagtgatactttttcttgaagtgtcatcttatagaaatgaatttaaggagctattttattatgaaatactctgaaagataccatgttgtgctcaaagggaaaaaaatagaatttagataaaaattacagaagttagctctcagtattcaggaggcagaagcaggcagatctctgaatttgaggccagcctggtctacagagtcagttccaggacagtcagggctacacagagaaaccccattttgaaaacacacgcacatacatatacataaaattgtgttttacttataaatatatataattatatatatataaaaaattatagaattctagtggctaatcatgaaacattaagaagagggtaactggggttggagagatggttcaatagttaaaagcactggctgctcaagaggattcagattcaatttccagaacccacatggctgctcatacccgtctgtaattccagttccttgggcttctgacaaccctcacacagacatacatgcaggcaaaacactaatgaacataaaataaaaataaattaaaacaacaacaaacaaacaaaaatgtgtaactgaactggagagatgactcagtggatacagcacttgtcacacaagcatgaggtcaggagttcaaatccctaccatccacataaaaacctgtgtgggtgtaccatctgtaatcccagtggtacggtggttgggcggggatggaggaatggggagaaatcctggggccaagttggctaaaaggaataggaaactctggattcagctagagaccccgtctcagtaaatgaattgagaggatgattaaggaaatgacctgacattaacttctggcctctgcacacatgccaacatgaatacacaagtacactacagaaaatacacatgataaaaatacacacacaacaggcacacacaaatgaactaaaacatgaacacaaattaaaattacagttgcttagctatatgccaatgtttgagctattggtcaaatagataagaagtaaagaataataaggaaggagacgttcctccacttaattaacctgtaaaccctgaatgaactttttccataaacttttaccacacttaaaggccatcttcaggctatttctaaacaaaaacaaaaagtagagatcatctaagtcattgagtttatgctaatgagaaaagaggagaaggaacaaggagctcttccaaataaaagtagatttccaaatatacttgtactacaaccagtaggtcacactaattgtatttatagtttctgaaccccttggtcattgtgcttagctgttaaaattagtacaatattggggctgggacatagctcagtggtacaatactcaccctgtgaggccaatccctagtactggggaaacaaaacactgctgtaaagattaatatacattaactatcaagaatggagtctatgaccatcaggtaagtttaagcttttatttttagagaatggatagggattacttaacaccatttgttgctctgagaagatgtaaacttttttttaatgcagaagacaaaggttaagtttcttacagaaaggtgacatcagaacttttgttgtcagtgacctaaggtatccccattctattaacaggtattattcaaggtgctaacaaatcatcaaatcaacacttcaccaagtggtttaaactctttatcatctgtatctacaatgtttttttcaaagaagttacagatcaacttagcaattttttccataacaaagatgttgtaaaggaattaagaatttcagtttacaattccagcatatcaaactctgaatggaaagagaagacctttggaaattctctattataaccttcattggcaaaggcaaagaagtccttaatcacccttctgttctcaagtgcaaagtaagctagccttgttactctgttgcctctaaattctaccaactgtacttctactatgcaatccaagaacctttactggatcacataaaatagttctatatattctagtatccttttcaagtaagtgttcctatcttgtgacagcaaacaaaaatgtaagggctggggagaagggggatactgtcaaaactctgaatgtcagtgagaaggcaaaaatcattcatcaaggttcaaaattgagaacatattactatgctgtctcatcttagtaaatctagaaacaatagaaatctagtaatagaaaaatctagagagaagtatacactgtctgcagcttctattgtattttaggggttactgctaaactacctcctaaatacgatttgcaattcatatcacttctcagtgcttgtgattctcttctacatagcttcctttgctatctccatggagacagacaacagcatcttggatcatgccattctcctggacaatctcatctcctgaactctggctatccttcaaaagttctttaattcccttctctactaagcattgcttctactttcagcatatttcttgttgctctcccttgtgataattttggttttctactgaattttgtaaatgatagacaaaagcaaacctttccatttttcacatttcattcaaatctgtgagctttgaagaatttaagctgtttaaattattgcaaaaccagtaaccactgtaatatttttaaagttttttgatactgaacaccttagaatcatccactactgctttatttttcctggttttcttatttaacttggaacacatgtacagactaaacttcagtaattccaaacaatcacaaatatttacacacaccccaatctaaacaccacaccgctactgctgcattccaacagctaaagcaggaatacctacagttcatgttcttacctgtatactctacttgctccttttttaaagcataaactttagttcattaggttactttctctgaacttgttctagatactttattaatttatgaagacattctatcaccaaaattctttgtatagaatgtgtttttactgtactgaagaaaccttgagataacagaaattatgcaatatacaagagatggcctagaatgttttctccttttttgagacagtttttgttccatgtagcccaggctagcctagaactcaagatctttcccccttcctccacttgattggtagcctgaattttaaaaatgtcttacatagaaactgaattttctgcaagtccattagttttccttgcatgttctacaagtactccctttgtctatagttattttcaacatcatttaaatgtctacttttccaattatttaaattccttatactggcaacctagagctacaatgcattgagaatacctgttattataggtaagacaaagaggcccaggtgaacagaacagaaggtaaactactatgactgagtaaaggctgtactattatataaagagcagaactgggtcaggaagaaggcttagcacagcagataaaaccacttcatgcacaagtctgacaaccggagtctgaatcccagagcacagctggatgcactgggtccacatctgtaatctcaacattcctactttgggacagggaatgaagacacaagaatgacttcaatccctgggtcatctagtctggaatatgtagctccagggcagaaacaagagagatcctttctcaacaaggtggaaggtgagaaccaactcctgaagttgtcctttgacctccacagccagcaccagcacatgcttacctaccctcacaggcatacacacagagaatgaacaaaacttaactagaggtagactttactaagaccaaagcacctggtaagatcaacagacgccataaaaagatgtcacttaccaactgcacctgacccaaatgtatcatcattgaattgatcaatttcttcatcttcttctcccaggccttgaaatgcatcttcatcttcatctagaggacaatcctctaaagactacaaaaaagagaaagacagttaacttttcatggcatttatgcagtcctaacactggttctttttaatgactgtaacatcttaaaacctttttgtaggtaagcactttacaccactggcagagacaatggaaattataaatgaactcttgattatcttgagtttcctataggtttttcaacaaaattacattttcttcactatagccatgtggttttcccaaccctttgaaatcgttccatctttcttcctttttcctgtggaactaaactctagccagaatgcagaactcaaaacattttcacccacaattcagttgcgcattaggaaaacaaacaagggtttttgttctactcttacaaaagtgcctaatcacaggcaattaacttttaaaaattcttttcaataatttatttttattttatttgcgctggtgttttgcctgaatgtatgtttgtgtaagggtgcgaggacccctggatatggagttacaaacagttgtgagctgccatgtggatgctgggaattaaactgggcttctctggaagagcagccttcattcttaacagctaggccatctctccaaccccaacaactcactttttaaattcagcgataatgtttagtctacttatgctctgtgctaggtactaaaccgtaatgccttaaaactgtaatttctgagccaaatacaacttggttcaaagaaatctgtgtgactatcaaaaaaggcaaagattgtagaatgctgaacaaaagctagaatccctgtatcttgggtatgtcctactatttcttcaggtacacgctagcttagaactgctgatcctcctgcctcaccttccagtgagaaaataaaaggtcaccaaatgagtttggtgtattctactttcaatgctttctctcacttcagtctatattcagtttaccaagtttttgttgcttctggcaactgttttgttttgagacatggtttctctgtgtaacagctctggctggcctggaactcacagagatctgctgggattaaaggtgtgggccactgctgcttctggcaatttgtattccctgtatcccatcatctctcttcaagtttacacagtgagttgagtccaaagtgtaaaatcaagtatcctactgtttccaatgttcaaagattccaaattggaattccacactccagtgggactgcttgtgatatatctcaagtgggaacttttaaggccctttccacccacactacggtcctctcaaacttccatagagccagccctccacaccagcctccacaccagaagtaactattagcaactctctatgaaatcacaatcatctacttgacccaatcaggatgactctgtaaggatttccctggttcagtcctgaaactataaatccggaatctgtttcgtcccaagattgggagttgctcaaggtcacaagcaatgggtgacggtcagcaaacagctacattctccggacaacctcaccaaacccacacttttcctccactcacccagaagaaacttctgctggacacgcccccctccccactccgagccttcttccccagcccatcaaagtctcagccaaaaggccagtcccggcccctccacctgacggctgcccgcgtgcagagagcccgctgtgtgtaacaggggtgaaggggttccgggtgcagggcgggaaaaacttccgtgggcattccccgtggattttgcctcaggaaaagtcaccgggtaggagcaatgctaatctcctcggcagctccgggagccgaggcgcaagtgcaggggtcaggttaccgcacttaacgggccctccccgccgcaacccagcggccggctctcgccagtcccgcccccacccctcgaggtccgctcgggccccgtccgagccccacggccgaggcgggggtcccccagtcacccgcgccctgccccctcctcagcggaacagacccacgcggcgggcggcagaggaaaaaggggcgcgcgggcgagggaggggtcacttccggccgcagccactcacctcgtagcggaacattcttggggaggggggaagggagcggggaggggaatgggggggagggagggaaagaagcgccgactccccgggctgctccgcgcgcgcgggtcttccaccggctcgcgacccctggccgccgccgtacgccggagcgtgcgtggggacgtgcgcaggcgcgcctcgggctgggcgggcgccccggcggcggcggctgcgccgggacagatttggcgttgggcttcccagtgtgagcggcgggaaggaggtcccgaggagagacactgcgcacgcgcgggcgatcggcgacgctttggggagcctgagcctgcggctccgcctccgtgctcccagcggcagcctgatgctgtgctcacagtcacgaggttgccgtcagtgacagggcggagaaaagccttgtgattgtcataggggtcgaccctgaagcgtcttgcttgaggaaatcgggcatattcttgggtgattttgtttaacgtccagcgtccttatcggggtgacttgacttggccagtgaggggtaaaataaggtggaaagtccgtgttgttgggaaaagaaagtcgctggctgaatcagcgggaggccgaggctgtgattgataagcggtcaccggaagcacatataggagggttaattaaggtgattttaggcgccagactcttcgggctggtgggaagcgggagataactaaaaagggcgacgcagcctgggggctgagatcaccgcagcaagctcggcaagcctgggcgcacagtagggcgacagccacttccgttggggaacaagcccgggagagtttgtccagcttacaagcttcggtaccctggttctataagtctggtgctttggtattttattgcatctagtgtttctggtgttgtcctcgctcagctctcctcccccacctcaagggctggtttttgttttttgtttgtttttttatttttgtttgtttgtttgtttgtttgttttttttgagacagggtttctctgttcagctttggagccaatcctggcactcgcctatccaggttggcctcgaactcacaaagatctgcctgcctctgtctccagagtgctgggattaaaggcgtgccccactaacgccctgttttttgtcattttgaagacagggcttctcaactgggcgggggacagggacggacagctaggtcctgccccaaatgatgtgacagactttgatgatcccccatggaaggcctcaccctctctgaggagtagatggggtgggatgggggtttggtggggacctgggagaatgggagggagagggaactgggattagtatgtaaaataagattgtttctaacttaaataaaaatttgtaaattaaaaaaagaggtcctgtatcattacagggtaaggacattcaggaataacaacaaaagaatgagtcacagttccttgtccaaagttagcagtctggtcgggtccatttgtgtcctttgacatccccgttgtcccctttacttccattgcttggttggtaaggggtcctagggactcctctaataactaatcagtagcaccatgtccagcagaaaatttacagcttgaccctctatggtgaagtgttgcagaatatttgatctcactgtgaaactctttaggttgtgttaataaaattaaccttggatcagggggcaaagccagtgactagttgataataattatgctggaagcctttataatttattacagaggtagcaattaataatctatgtatcaactccagaatatttgttactacaaaattggctatgtataaaatatatactgggtgctgtgtattctcaattaggcctcagagaaaggaatcccttctcacctgggtgtcagtggtaagagcaccctgctgcttactgaggctggaagcagcagccactgggtctcacactacatagccttagttttttccctttgatatagtgtgagaagtcccctttaatcagttaatagcactgtgcaatagtgttgcaatagtgttgcaaattgtatccccgctgagacttgagtttgcctagataagacatgaggctccctgcttttgtcaaggttttaactgccttcctggttctgagagagatgcatgccctattgccagagagttgttttaatgtgtctgtggatataaaaactagaagccttgtgggatgaaaagaaacttttagagaatttttagaaagaactctaggagaattttaaagaacttctgaagagaactttaagagagcttttagagaaagaacttttgaggagaaatcttagagattttgagagaacttttggggagaacatttttggaaaaattaaaagagttatgagaagaatgatacatgtatggactgactcattggccctcagaaccttttagtcaaccccaacccacctgctgtaagcctcctgcctgaaccctcgatagaattagccatagagaggatagaagagctggaatgtgggtagagagatgcataggaaggggtagggattcttggtcctttgtggtttgggatgagtggagagacacttctcttgctgggtctccagccaaaaaggaaggctagctggtttcttttctgcttctttggtcaagcaaattttcacccccaacatctgactcctgagtctttattggtaaatagaacaatagagacttagataaaacttaaatttggtggcaatggccgagctggtgctggcaggaccaggaatctagccaagtgcaatctgagcagcagggtgctgactttttggccaaggggagcagatggtaattaaaaacatcagtagattcaggtgtggctgctgctaagtcaacaggaaaacaacagtgaagtttgtaaggattcaggcactatgctggcctgcccctgtcacctggcagaaggcactcaggcagtactctggtcagcctagggttccatgactactagtctgcagcaggtgcaaaggacccctttaaaagaaaggcccccactcactcacgctctctttctggctcttctccctctctgctctcctctttatctgctcttttccagctctcttacctctctctttctgctcttcccctggagcagacaggacttttcctgtctccctcttctgtcccctctctgtgtctctttacctcttttctctttgcttccccctccttcccctttctaagaatacttctcacttaagctctgtctgcctggcatgtttgttcccgcgtaggtcaccctcgcctgccatgaaatctgccatggtcccccacccaaggtcccccttatgctttatcataacaaagtttactataggattctggggactatgttcaaaagagccttgtcttgactaatcctccacagctaggattggcatgggtgggtgagggcatttacctgtttctgttgtgggaatttgtttttccaatgacccatttcttttcagtaagcacgttggtccttttgtaaaggactcctcttttttatcatggggttcatgggcagagttgaaagtgactggggtttgtagtacagtcatggtggcacaccccgtcttctttatcagataatctttgctgtctcagttggaaacactttctgggctattcctaatagttctgatctgttctttctgcaaacccatccatcttctgtatctttctatgtatgtcaggggctggctgagtaacaaaggccaggttaattaacttgagatttaccaggtcctctgagtctatagggatatacaaccaataggcatccaggaggtgctccaggaaagctaaaggtggctcatctggtctgttttacatctgctaccttagatagactagtagacttttgggctgtccgtttcatcagttctaacagaacctggtggtactcaatgagtggcctactttccttcttgttgtagtcccattggggtctccttggcagagcatggtcggttgcctctgccatgtggtcaatagttcagtcattgactattccagggaagtgcttcagttgctttcatgagaatttgttccctttcttcggtagtgaggagagggtacagaggatttgctcacagttgacccatgtggggagatgatttaaaaatacagaatcaattacagaaattaaggaatccgagttagtcctgaaagggaggttgtggttcttccagttgtggatatctgtgatggagaaagggacatacaggtagtgatcatcaggaaatagctgtagggtagtgaagactgaaggaggtaccactatagaaccagaagcagaggagtcaggacggtcatatgggttcccctggtgaggagggggaaagacaaggaggtagggaggagcttggtggggagataggtgtgggtagaaaagaggtgtataatagggtaggggtagatgtggacacggcaaagtaaggacttggtggggactggggtggcaagggtggaggttcaggtgaccagggaagcaagatatactaggctttcatttttggggggccaccaaccagctcccaaataatgacatggagacttattagtttgaaagcttggcctagcttaggctcatgtaatacgaataataaaaatccagagacagatagtggggttcaagctgaaggtcagagaagctaagcagtcaaactaccagagagctcttacctctacctgggctgaggtgatcctgatctcaacgtgactggagactaattgcccaagactgactgaatgtcctgctcctatcttacatacctctctagtgctggaattaaaggcatgatctgtttctcttttagactgattcatttgaatgtagccctgggtggccttgagctcacagagatccatctgcctctgtctcttgagccctgggattaaaggtgtgtgccaccactgcccagcttctatgtccgtggctagctttgtattctgatcttcagtggctttattagataataatatatcaccacaggtttctggctagctcttttaacttaaattaatctgtttatctacgttttgccttgggcttttttatttttctttccttctgtatatcttattttaatgctttttctgtctgtctgtctggtgactgcctggcttcttgcccctgtcatgcccctctcctcattttctcccttcatcttctctcattcttcaggagcttagatttctcctatttattctctctgcctgccagccctgcttatcctttctctgcctagctattggccattcaactttttattaggccaatcaggtgcctagggcaggcaaggtgaaacaaacacatctttagatagttaacacattcttacactgttaaactaatgcagcataaacaaaggtaacacagtgtagtgatatcttgtttatactctagcaaataaagcttgcatgaagattagagggcagagctagccactagttaatcatagagatctggagggtctgtacagaaagagaggaagtggtatggctggacagagagaagaatccataattcgggaggagacaggagctcagtctctttttggctggaagttattgaggtaatgtgtggctgtggttttctcttccatctctctgatttttcatcatttcctcctatatctgactctgggtttttattattaagacctattagaacttgtgctacaacatgacttttacacaattaaagtaatattccacagcataaacaaatgtaacacatctttgcctagataaaataatactccgcaacagtagcaggtaaagatggttatatggagggaggagggattcttcttcccgggagtcctgcagaatggttttcagagaggggcttattgatctctgctgtaggcccttgaagggtccatctgctgacaaccagggcttggccactgtaatggtttgaaagaagatggccctcaaacagagtggtactatcaggaggtatggtgttgttggaggaagtgtgtcactgtgggggtgggctttgaggtctcttttgttcaagcttccctcagtgtgactttcagtcaacttcctgttgcctctgagtcaagatgcaggactctcagctccatctgcctgcacaccaccatgctccccgccatgatgataatgaattgaacctctgaaactgtaagctagctgcttcaattcaatgttctcatttataagagtatccatggtcatgatgtctcttcacagcaataaaaacgtacctaagacagccactttaccaattgtggaccacacagaccttcaaccatgggaacaggttggaatttgcttcagcccaaagcaatatgtatccaatttgatctgggtggctaggtttactgagggtgacatttatccttgcccaggctatctgacaatcaaaagtatgctgggagggctgatcaaccctgaatgtgggccatacagtttcacagagtgtttggagataatgcttggtgataggatagtcataatcctccttgaatgtagggggtaaagtttaccagaattcttaagaacacaggttagagggctgttaagcttgctagtcttattacccatattgtgtagttgggccttttttatcaggatcactggctccccagtaataacatggaggtttattattaattataaaagctcagctgatgacctaggtttgttactaactagctcttacaacttaaattaacccatttctattaatttactttctgcctcatggctttattacttttactctgcagtgcccatgctgctttcctgcttcctccttttctggcttggtgactctgcctttcttcttcacagcatcctctgtaacttgaaaaataaaatacccagagactgatattgggattcaagcttcaagctgaagatcagagaagcaaagcagccagccactagctcttaccgctccctcagctcagaccaaagaggtgatcctcaaactgctcccaacctcactgtttctagattcactcagactgctatgctcttctcaacatggctagacactaactctcagcctgaatgcaagatctgtgaccctgatcctgtcttatatacctccctaattctgggattaaaggtgtgtgatcccagatcctgagatcacctttgtgtgagctgtttcttttaggattggatcaatttcgtgtagtcagtgtagccttgaactaacagagatccatctacctcttaatactgagtcctgggattaaaggtttgtgtctggcttctatggctaactagtatggatgctttgctattttgatctccagtggctttactaattcataaaaaatatgtcaccatagtcctccctgccctgaaatcctgtctattggtcattcagctttttattaaaccaatctgagttacaaatcttcactgtgtaaaaaagattattccacaacatttccccccttttgtctaaataaaaaggataggctttaactctgacatattaaaactataatgaataggaacaattatcaggtaagaattacatttacaatgtccagtccatttgtatttggcatttggagaaaatgctgcattatttatccatcttgatgagttcaatgctttgtacataatttaccttttatcataaccaaggaaagctataactatgactatctagtcttcaattccatcatagacaccagaaggatatattacttgagtaaacaggaagtgcagagcaagcaacttccaaaactaaaagaaatgacagcaacagctgccaggaaagtcacccaaggtttgcaacattggggcatccatctttgtcctacaggcctagaatatctggcagacttttttgtgaagctagaatttttgaaggactatcctaccctgtcttgtaaagttcagcagtcacttttctttgtgtcttgcttgtccagtttggaaagcatactgtcagcagttgaggcaagggcagtttccttgaccaattggctagcttttgctataaagaaagcaaacttcaatcagaggtttgttgatgctcatcatcctttttttgaagtagattggtgccaccaggagcagatgtgtcttattgtcatgcaaagccttatgttattaaaacattttaaacaccatattctgtaggtatttgatgtgcttgaagaacacctatctatctaaaatatatctctgtatgacctggaaaacatacttaacatgaatgtaagtttgatagttatagatgactattaacctgtatttattatcctaaatagcttttaaagactaaaactttacataactttttaaaatgagggacataggtacaagaatagagcacatatacagtataacaaaaataaccttaaatttgtatcaatacacaaaaacccataccaatgtaaaatatttgaggctagtggttgtttaaaagtagactcaacaatccacccttttagcaggtggtgaaggcacaggcctttgatcacagcacttagaaggcagatgcaggtagatctctgtgagttcgaggccagcctggtctatagagtgagttccaggacagacaccaaaactacacagagaaaccctgtctcaaaaaaacaaaacaaaacaaatcaaaacaaaacaaaatccacccttttatctcattatttttatactatgtccccctcctttttcctttagaaagagatccttgaatctaactcccttgtttagcttttttcctgacatggccaaccctcctaaatggttacaaacatctataacccatcaaaggaccaaaagccttctaccctaccttttgggaatgtgggtgttgtattctctagactgcttcatgttgtatggaggtgctggcatctttaggagaccctgggacttttgggataaccatcaagtcctgggacatttagctgtattatttgttgtttagtctctgtgaagtggtaaggcttatctgaagtcctggctggagtagtctgtgaatctggaccatcttagccagcagccttgaagtttttctgaatgcataactctgaggaaagtgcaacagagacactctgagatgctccatcaccagaaccacccattttcattggtgtctggtccccttgctctgaaaacacaaactttgaaagggagcatacatatctgcattagcacaagtatggatgagtagtgtgcacaagtcagttaaagatgattttctgttttctgtttgaacaggtaaaaggcatttgtcaactttataagttcatttgaaccatataaccgaattgtaatataaatctctatccgtgtcatatgaaaagatggctagtaataataagtcatgaggactctgtagacaacaagatttattatgtccatctcagagatgttcccatgtcaagggatcaacttgcatcacctgtcttgtaggcttttttgcttcctcctccatgtctgtagctaagatactgaggaggtctcacccagtcaaatctgatctctcttaatctggaaggaatccacagccttttgtttccacaaccaaccaacacattgtccaacttccattttgaaattatgattttttaaaaaaatatataggttgggttaatttagtagttttcataatccaatgtttctcatcagctattgtttttgtacattggcattttaaaaaattcaaagttaacaaaacaccatacaggatccagactccctgcgtatttcccatccttgcatggcttttttttttgttactttactctctctttaaagactttattatttttatagttatttattttttctatgaccgcctatacccatttttttgcttaagcttacacacattgttaaacacactgcaacccgttaagaggttttccccattgcctgcatgtatgtctgtgcatcatgtgcatgcctggtacccacagagtccagaagagggcatgaggcagttgtgagcagttatgtgaatgctgggaattgaactcaggacctctggaagagcagcagtgctcttaaccactgagccatctctctagccccccaaatttcttcttcaatgtcaagtaacatactgtgtagggggtacgaggtagaagggatttatacctactttccatccaaagggctggaatagatgttgtttatagtctggtgatcgttgctgttctgtagagcaaggcttcaccaattccccagactcctgtatgagttaactgttttcctgtatgagagttgctgtggtcatgatgtctcttctcagcgatagaaacctaagacagccattatataactttggtgtctaactttggggactgcttcagttatcgaaggtgtgcaacataccatcctggatttagtgcatgatacgattgttttattttgctaatgaatctaaaaaaattgaccatgatgccatgggaactgctcatctccacatcatgggccattatctgatgtcacctggaagctgagtcagtcagttgttgggagtgggaatcacttgaagtttgaagtatttagaagttggttcagtctgtagttgggagacccaaggttctcagttgagacactcagctgtgggtatttgttatggtccccaaatttattggcagtgatggctggattccaagagcaagtctccaaagagccagtgaggagatgtacatttaccacctaggtctgaaacaaagactgtagcatgactaataaaaacccagagacaggtattgggtttaaagctgaagaccagagaagcaaagcggccagccactagagttcttatctctagcaatgctcagaccaaaggggcggtccactgaacctcacactgctcccgattgcactgccactcagactcactgagactgcaatgcgtttctgtgtcctcccaccttatatttctctaccactcctgtctccacctccctagtgctgggattaaaggtatgagctctgtttctcttttagattgatttattctcatgtagcccacgatggccttgaactcacagagatccatttgcctgtctcctgagtgctgggattaaagtgtgtaccaccactacctggcctctatggctatggctagctttgcattgtgaccttcggcaagctttatttgatcataaaatatcaccacaaaaaataatattattctcatggtcagtaagccgacaggagcctgagggacaccagtggaagagtgaaagagttttagagctgccatgttgaccagaaaggaatacataagaaatggaacagccactcaacccagacccagaaagactggcatttcaagtgatactgtcagtataccttagcaggaaaccaacaaaaacctaatgtctgagttttcaggataatgcgaatggagctggtctctctagtttggtctctcttccccacgaatatgatacatttggttttctaaacaaaagaaaatgcattttaagaaacaaagtattgttggtgtcagctgggagctccaaatgataagaggtaagatattggttttatcatgtgtagtgttagcagttctgacaattgggcttgcagagaatgctcagtggttgagagcacttactgctcttccagagtactcaggttccagtcccagcatccgcagggttgctcataaccagtcccaggaatctgatgccctcttctggcatccatggacactacatgcatgtggtacacagatatacatgcagttaaaacacctaaaaataaattaaaaatacaattctgaagatgaacttatatttttcaggtcacacttctgactaaatttaactaccaatctcatcaccacggataagtcaaattagtttgcccctgtgggcgattgaaatcaagacactgacctcattttttggtttgtttttgttaaaaattagctaaattactaagctctgcatttctgaacctttacactgcccaacataaatctaccatgtactaagtatgaggtcatagtagttatgattttcataatctgtaatgtacatcaggatcattgttttatataaaggataatacagtttttgacaatgatggaacacttcaggaaagcccctgatttttgaattttgtaactataacttggcaacaaatgtttatgatttttgtgcttaaatacttgctgacattcaaggtttcagttcagttcccaagtctgttctgcagccctgatccatcagttcctctccttcctactttcttttgtgtggccctgtattaagtcttactttgtgataacctcttgggtctgcttgggttgattcagagccttgaaccacaacattaattttggttgtagtttttttttttgagtaaattttatactgttttcttcccttttaaaaatatttatttttaaaagaattttattttacacaccaatcccagtcccctctccctcccatcctcccattcctcaaccatctccccaccccacacccatccactgcccagagagggaaatgtcttccatggggaatcatcaaaatctgtcacatcatttggggtaggaccaaagccctcccccctgtatctaggttgagcaaggtatccctccatagggaatgggctccaaaaagccaattcatgcactagggataaatactagggataaagccccaccccacaaattgaccaagccacccaaatgtcacccacattcagggggtctagttcagttccatgcagattccccagctgtcaggagtcagtgagctcccacttggtcaggtcagctgtttctgtgggtttccccatcatggtcttgacacctttgctcatattataaatcctccctctcttctactggactccaggagctcagcccagtatttagctgtggatctctgcatttgctacaatcagttactggatgaaggttcctgtgatgacatttaaggtagtcatcaatctgattacaggggagggccagttcagataccctctccactattgcttagagtcttagctggggtcatccttgtggatccctgggtttctctttaaccccataatggttccctctatcaagatatctcttttcttgctctccttctctgtcttttccctaacttgaccttctcaatctctcctgtactccttcccccaccccctctctctcctggtctcttccactaccaccatgctcccaatttactcagtgaaagaccgaaaaatatagcctagcctgatactcactagcatgtatttgaaaatcactctgtccacacacagctctgggacaaagaacatatgaaatggtcggtcatgatgaccagtctctggaaattattattactagtttctattatcttcaacaactgtctggtttctaaacattgttatgggttaccctgctccagagcacccaagttttgaaaataagtataagtcactctgttcccagaaaaaccactagctgtcccatagccttgcaggtgtaaaaaccaaaataacattccaaacccctcgtgggcaaaattataagttcagtacccaaccaatcagtaaatgactcatgtatgttatagccaatcaatatgttgttatactactgcctagtgaccaaaaagacataaaaactgcctgctttggaaactcggggccattctcttcccagggaatgaccccaatgtattggaataaaatccttttgcttttgcatcgaacttgtgtcctgtgagtgactctgtggggtgcatctcacggagttggacttcacttttgggtccaacactcaggagatcttgtctatttccccttattgggggtgtccatgtatgtctctcttagggtcctccttttatcctggcttctctggggttgtggattgtaggctggttgtcctttgctttatgtctagtatccacttatgagtgagtacataccatgtttgtctttctgggtctgggttacctcactcaggatggtttcttctagttccatccatttgcctgtgaatttcaagatgccattttttttaacactgagtagtactccattgtgtaaatgtaccacattttttaaattcattctttggttgaggggcatctaggttgcttccaggttctggctattacaaataatgctactatgaacatagctgaatagatgttcttgtggtgtgagtgtgcatcctttggatatatgctcaagagtggtattgctgggtcttgaggtagattggttaccaattttctgagaaaccgccatactgatttccaaagtggctgtacaagtttgcactcctaccagcaatggaggagtgttccccttattccatgtcctctccagtataagctttcattagtgtttttgatcttagtcattctgacaagtgtaagatggtatctcagagttgctttgatttgcatttccctgatgactaagaatgttgagcaattccataagtgcctttggccatttgagattctgctgttgagaattctccattttttaattggattgtgtgtgtgtgtgtgtgtgtgtgtgtgtgtgtgtgtgtgtgtgtgtggtgtcaagttttttaattctttgtataccaggctggccttaaactcacagtgatctgcctcctgagtgctaggattaaaggcatgtgccatcaccacccagatatgtactgtattcaacagtggctgcatcatttttcagccaacattgtggtaagtgtttatacctctttgtatctttgacaagaacattgactttagtttttaatactaatatatttgcatattttatacactttgtattttgtctccatctatgtatatatgtgtgccatgtgtgtgttcttgaggtagtcagaagtgagtgttggattccctggaacagagttatcaaaaggttgtgaaccaccatgtgggtgcagggaactgaaccagggtcttctggaagagcagccaatggtttttcttttttgtttgcttgttttttttttttttttttttgagacaggatttctctgcattgctttggaggttgtcctggaacttgctctgtagaccaggctggccttgaactcacagagatcttcgtgcttctgcctcctcagtgctgggattaaaggcgtgtgccaccaacgcctggctacgccaccaatgcccagcacagccaatgttttaaacttctaagccatctctccagctctatcttttgcttttgtttatctatttgtttttttactatcttttgtttttgatagtagctatctttttttttttaagatattttttatttattatgtatacaacattctgctttcatgtatatctgcacaccagaagagggcaccagatctcataacggatggttgtgagccaccatgtggttgctgggaattgaactcaggacccctggaagagcagtcagtgctcttaacctcggagccatctctccagcccgataatagctatcttaacatggctgtgctcctgtattgtggttttgatttacgaagtcattgacaacttattttcactgagcatcttatatacctgttggctatttgtttgtcttctgggagaaatgcttattcaggttcttatttaatttttagatcaaattgctagtatttagttgtgtgagttccttaatgttttagagattacccgagttttgatgtataattttcaaacataacatctgattttgtgcctatgtttttactctgctgctgtttcttttgttatgcataagatttttagctggatgctgcctcacttatctatttttgctttgtggttcatgtattttgtgtcagcccttgattccattgcccacaccaagatcaggaatatttcctcttattttttttgtgggcttttatcattttgcatcttatgtttaagtcttaaatccattttaaagattttttattacttatgtgcatgtgtgtgtgtgtgtacatgtgtgtgtacacatatgtgtggaggtgcccacagatactggaagaaacaattggatccctttcagctggagttaaaggctgttgtaagccactgaacaggggtgctgagaactgaactgcggtcctcttgaagaatagcaggtgctcttaatatttgaggcatctttccagcccttagtctttaatacattttgaattaaatccccccaccaagtatgtatgtgtgtacatgtgtgtacaggagtatgtgtgtgtgtgtatgcatggagaagccagaattcaactatcaacctgctcttcccgaggtcctgaattcaattctcagcaaccacatggtgggaaccatccgtaatgagatcgggtgcactcttctggcctgcaagcatacgtggaggcagaatgttgtatacataataaataaataaataaataaataaataaataaaatctttaaaaaaattctgagcactgtggtgagttttcatttggcttagcaacaacaaaatacaaaagaaaaattctacatgtcgccaactataaagcttaaaacattattattattattttttccattcataacctggttgtacaataaggaaactggagcccacagagctggggagccttttctactattacatatggttctattggtaaagcaagcccagaattataagaacatcatatggacagtgtttagtctttagatttgtcgatactatgttctcatattggatatattaatttttagcaacttacagtttttttctctgaataatcacaatgatgatgcttagtatgaagtacatgagttaatctatccaaataggtctataatagctgcccagctcggcttctctccattcctgcccagggcataacattgctttatgtgatacagctttattttcagaaagacagaagcatgcatttttctctggaagtcaaatcagacttaagatatcagaccacgtgtctccaaatgctaaggacattcgtgctctatgcttgtcattccaccattaccttattataattagttggtttatttgttgtgagacaggattttcctatgtagtttgttctggcttccaacttgcaatccttctgcctcccgagtactggaatcatatgatcacacccatatgcctggaatcttcctaattagtaatagcatcccatttcactttcagaagtgccttgatctaaacaaacctcaagatcaccctccctagaactttctcagtgccttcctcagagcgtctttcagttccttgttcctcatactgtagatcaaagggtttaaaatgggcgtgataaaagtgtagaccacagacaccattctgcccatctcaggagagtagctggacctgggggacaaatatataaaactggtacagccatactgcaggaggaccactatgatgtgagaagaacaggtagagaaagcgcgatggcgcccttcggcagaccggatccgtaaaatggctgtgatgatgaagacataggagacagagatcagagatagggggatgcttaggacgatgaagctgatgatatacagggcagtcctgtgaacgtgtgtgtctgcacacgccaggcgcatgacagcaggcatgtcgcagtagaagtggtagatctcattgttatggcagaacgggagatggaagattaaaatagtcagtggcaatgacaacagaaatcccagcaccaaggatcccaccatcatctccacacacaaggaccagctcatgatgagtgtatatctcagaggatagcagattgcgacaaatctgtcgtaagccatgactgcaagcaggacacagtcagctccacccaagaagacaaagaaaaacatctgggtgccacagccagtgatggaaacaggtgttttgcccatagagagaagatttaccagggccagtggtgcaatggatgatgtatagaagatttccagaactgctaagttagctaggaaaaagtacatgggggtgtggagtgagtggttaatatggacaatcacagcaattgtggcatttccactgaggctggtcaggtacatcactaagaaggccacaaaaatcactatttgcaccccagggtcaggtgagaatggacgaaagaagaattggatcctggctgttttgtttattgtttccatgggagtgtacaagacctacctcaaagagaaatgacagcagtctcaaggtatctctcattgaatatgatatcccccaaatcctccatttactggtagataaccttccaaggcacctcagcaacagcatgcatagtttatttcataggagtccacagaacaaatgacctatacatttgccatcctctcatctcactttcttttctctccaggtaccaaagactgagaaatcctcagtgatgggagctttgatgacatctgaatgcagtgtgtacgtagaggagtgccccaaagtatgtgctgaacaaaacaatgaataagaccaatttatagttcaaagctgcaagatagagaaacaggatattgattcattctatgaaaattaaaaaacgttagaactatataggcaaatgtgcatcataatttagagagaattatgctactggcattttatgatactctatcatatatctcttgtgtttttcaaacctagagtctttattgtttcattttgctttggttgttgtttgttgagaaaggttctcctgtagcccaggatggcctcagactcactatggagctgaacctggtcttggacttctgtccttctgcctccaccgcctgaatgctgggattactggtgtggaccactattcccagttttatggcatactagtgtttcatacctgctaggtaagaactctaccaagaaagttgaatcactggccctgagtctgccttgtttttctttttctttttgtttaatttattaacagccaaagggcattcatggggctctgttcccatggtatgattcataaccaaagagggaattttcttcttttttaaaaactatttatttattatgtacacagtgttctgcctgcatgtttgcttgcaggctggaagaggacaccagatctcattatagatagttgtgagccaccatgtggttgctgggaattgaattcaggtcctctggaagagcagtcagtactcttaacttctgagccatctctccagcccccatgccttgtttttcttaacaggatgatttctagttctattaactttcctgaaaatgtgactatctttttattgcttaaatgtcaatcttcatatacgtctgccaattattttaatctttcttgaacctcactgttctagtccaattccatgttgacactgaaatagtcatgtttgtaccatgtgatttagtctaatctgggtcttgcttctaactccatacacttccactctcaatctcctctcttctgcatagtctaaagttcatccaatttttcaaattctaggttctgttcttctatgaaactaccatagagtactgtagttcaaagttctccttctgaaattatttatgactgtgatttaaatgacattacattgcctcttcttgtatcattatcttgtatcatatatatatatatatatttataatttggtacaggacatataatacatataacataattatatgaaatacacacacacacacacacacacacacacacacacacacacacacacatatatatatatatatatatatatatatatatatatatatatattcaatgcagggtttctctttgtagccctggctgtcctggaactcactcggtagactaggctggcttcgaactcagagatccgcctgcctctgtcccccaagtgctggcataaaggcatgggccactaccacccagctcccaattatattttttggttttcccaaattgggactgggttctgaggtcaggattttgttcttatgacaaataggcatgatgaaatatgttttattaagaattttctcacttaatccataacagtacttcagtaggcaaatataattgacatcaaaccaatcacaggtggagacacccacaggagattaaggaagtcaggaactcagaaaagcataacttccctttcctctttctgtctctttcctatgcatgcttccctgacactcttggtttccttgctctttctcttgacctcttatttagtccccctttgtcatgctggtgctcttctgctgtgtgactgaccttcattgcagaacttaactctaaattaagaaagttagtgacatacaaaggtgggagaggcacaacgtaaatgacatgtaaatgaaataaggcgtggcccagcacttgaacaccggcttttctctcatttcactatcccactcccattctcaagaacacattccctttgtcaataaactgtctttatgtttatttctaaacaaataaataggaataaagaaagaaaaagaaggtcttgcaaatccagaacagtaacacaggaaagccatggtttgatcaatttggttacacaacatttctgccttactcttcatctgttaagttgctttattgagtggttgactacagttcagccttaggaagaactctgggtggtcattgtggggaaaatacagctaagataaagctaaggacaaaaatgttaagctacagtgtttttagactcaagatactgccacaacctagactgtgacttatccagtaaggtctccccaccaatgcagcagaaagaacctctgttctttgtctcctgatgattgaggggaaagtatttgtctaaaggctatgttgtttcagggcagagggagagtggtttaatttatccttcatgagtgacagaacggtaatgaagaaaagaattctctgtgagctaggacctgatggcttgttcgatgccccaagaattttcattaggtgtctaggatttgaaatgcatgcctcctggttgctaagattctagttcaaaacccagaacagtatcttgaaattaaagctaatccacacacaatgaactacctagttcactgggactctagagatgagaggtctcagtggtagcttctatcatgttctctctagccctcttaggctcaggaagtccccttttaggcaaaaatgtacctaatttcaagtcagttgtgtttcagtgactatataggtttcatttccttacaaagcctagagaaaaggagaagacaatcattgcaaaatattgcacaatccaggatacttcactaaacaaaatagaaccccaagcatcataatgctggtatatcacccatcttaatttctttatgaaaatgcttcacactcatcatttcccctcctacctggagatgaggcaaaactgtaagttaggtcatatatggaagcagagttaactttagcatctatgaagagattttgccattgcaacaaaaaggcaatctagaagcagcctttgaaacatgatccagaatgtttagacacagaattctttttttctattttttaaatagaaatttaaattagaaacaagcttcttttacttgtcaatctcagtttcttctctctcccctcctcccctgcccccgccccccaccgatccccatcccaactccttcccagacacagaattctaaccatatatggcaaaacaatgagtcaaacattgggcaatttgaaaaggcagagctctaaacagtgctgatttcatttttcacataagaattgaggcaacaatgaatacatgcatccttacccagttggaatgtattatgctctaggatctaaacggtacaaagctgtgttcctagaaaactgaagttacaggatcttctaaagatcatttttaatttgaaaaattgggggcaataatttttatatcaaaacaaacattggtttgtttgtggaactttgggaggataaaaactttaagactttaagtaaatgttttgtttttttccctggtggctgatgactaaattcttagtgtaaactatcttgctgctgactagggcacttgaatgcaaaggttttaggagcattggtttagagcattgattaattatcacctagtgcaagacaccattccccaaagttttcaagtccggaatcttcacttgaaatagctcctctcttactatttttaaagaaaacaactaaagtagcaggcaatttcttctgagacagatacagctcagaaaaaaactcccaagtggcctctcctttttaaaaagaaagatagtttattattatcttttgagactattcaccagcatgaaccaagaacaacagtttacaagttctttgctggtcgtttcacccatgtaacagttggctcgtggcctcagaaactcctagatgcctgtagagagagacttctgtaggtcacccagtctatctcttcaaggaagagagtgtttgatttgtccaacatttataatggatcagtttgaaaataagtcatttaagtacacagtatgctaaaggagactcaaagatgacagagatgccatctcctctatgggatcgatggggcaacaccatttgccaatatgtttgcataatcccacccaaacatttcaagagaaaatctcagtggctttagggcaataaaaccaccttcttgattatataatgtaattccagctctctctctctctctctctctctctctctctctctctctctctctctctctctgtgtgtgtgtgtgtgtgtgatatgtatgttcctgtatattatataaattttggagtgatgtttccaggggacatggcagaaagtaggctatgatggaattacatgggatgtgttagaattccatctttgttacttaactacttttgtaatcttgtaaaccagtttaccttatctccttagactagcatctcacctatttctaaggctatagcatagatatggactcaccctagtggggggagtaaaagactagtttgctgattctgattatgagatgagcagagaagagggaacaacaccataaccataatagccggggcaaaagctctgcctgcaacacagcacatggtagcttcaggagacacactggctgctgctgtcagagaggagctgctgaagtctagttaacagcaagagaggacaggaggctgggaaaatggagataaaacaaattgaacccttctgctattcattagcctgtttaattatgcttttgttttataatgatcttgttagaaaaggattgatacaattttgtttcagtaaaaatccctttatctttctggcctcagtttttgtaaaaccaaaaacacaagatcttcccaaacaacaatagcagcagcaacagcagcagcaacactacaggtttcaatgttagatgcattcaaacaagaactattgtagctatgatgcttaggttgacctgaaattatagaataggctgaagtgctggggttaaaggagttaacctccaggtttcagctgtggcattcttgaataacagttatgtatgatttgcttagttttgtttatttgtttgttttgtcagtagcatctagaaatgaaggagaagcaaaactggatccttctactgacagcatgctcctgaagttcaaccatagcagtatccaggcaatttttttaaaatttatttattatgtatacaacattctgcttccatgtatatcttcacaccagaagagggcaccagatcttataatggatggttgtgagctaccatgtggttgctgggaactgaactcaggacctctggaagaacagccggtgctcttaacctctaggccatctctctagcccgtatccaggcaatttaatatggttgacatgatatgtttacaagtgaaccatgaagctatcacataaaacatgtaactttattgttgatgtataatttaaaaattattattattattattattattattattattattattatatgtatgggtgttttgcctgcatgaatgcatgtgaaccatgtgaatgcccatgtgagggcaaaagaggaagttagattcccctggaactggagttatagatgtgagccaccatgtggatgctgggaattgaacttggctgctctggaaaagtaggcagtgttcttaattgctgagccatctcttcagcccctcatattttttgaatgaagaaactagggtttgaaagtttaactaccttgcccagctgataaatgacagggcagaatttaatgcttaaaccaacctggaattaagtctatcataaataaatgacagctcattggacaatgtactaggtgcagaatgacagctgtcctagagaagggaagtcctttaattctaattttgattttttaaactaaaaaactatgccactgtcaagtagtgcaccacatgcatcccaaaattatgttgattttcaggctaaagagttggctaagtggttaagagtacttgtggcacccatatgacagctcataaccattcgtaactctagtgtcctagagaatccaatgccccttactggtttccatggtcatcaggtatgcacacgatacacatacatacatgcaggcaaaatacctacacacataaaaataataaaagtaagtaaccaaaaaaacatgctgagtttgaaactctatttcctttccgatcttctttctctttcatcatccacttacttaatatttattttcatgaataattttgacaagtctctctctctccctccccccccctctctctctctgtgtgtgtgtgtgtgtatgtgtgtacatacattacatacatcttggggagcgagtgatgtttccaggaaaattcacacacacacacacacacacacacacacacacacagaggggagggaagaagaggggatggaaggagggagggaggaggacaggttctcactgtttatttctgtctggcttggaacttactatgtagaccaagctgggttcaaacccacagagtgcagcctgcctctgccttctaagtgctagaattaaacatgtgcatcacaacacctagctttattttaacaaacattatggaaactttatcttatctttcctttttttttttgttgagactttatcttaaacaaggtctaactctagtttctgggaaagaagagttgaaaaaacgataaagctcaacattgaatgcaaaagacagtaaaaagcacaccaggcaaatctagctgagggctgctctaaaaggacaatgtgctgtggttgccaggcatttttgtctctttgcagcaatgcctttttaacaaaatgtgtgctgtcacagttgttttttaattcataagggagattcatgtgaagaaagcttctgattatttattttttaatatagcaagtgttttctattttccactgctgtgaaattaaaattggggatatttttaaaaagtagagaactccttgaacacattaatatttctgtttcagggctgatttagtgttgagcatatattatctgacttaggattgtgaactcttgctctttgggaacagaagcttctctctgcctggcatcagtttgacaagcacggttttatagttcttgagttcctgaaaagcttccagatatcaaatgctgcttctgagaaggaactacacaatggccttctttgcaaagctccacacaacttttccctggccaatggttacccaagcgttggcatgatggatggcacaggagttttctaatataaaatctgagataagggatgagattcttaccttttgatggactcctttggagttctatacattatgaatttacaagaatccttgacaaaactctcagagctcaaggggtgtgccccaaggcttttgtgttcttgcaaaatctccaggctgcaatgctgaccacttccagatcacacgtgttgctaactgacagcacgatggtaaagcatttaaaaaccagacataattcctatcccattagtacttctaagtgtacattccattctatcattttctttgtttaaggtgacaagtgacttttacttatgacatctttgtagcttgaagttgtgctagtattcagacttgaaagtattattaaacaacaatcataactaccttggctaacaagccattgttggtcccctgagatgactgaggtcagcttgggaagcataaattggcaagatgaaaaaacactacccaagagttaggttgcatcagggctattccactggtacaatttccctaaggactgtattttagttagcttgctcatgttttcagtgatgaggtcagttggggggaagaaaaattactgtttccactcagtttacctgaaaaatcatttgtttggctattgtttttaaaggtttaaactggttagattacttttcaaaatggggtttgaggcaatgtacaagaatggctaaaagatcagacaggtcttgtgatggggagatggctcagttggcaaagtgtttgggagttttgatccccagtacccatgtaaaatgttgagataaagcacttgtgcttccagcactgaaggtggaagcagtaggatctttgttgctgaccagacagtctagctaaattgaaaaccttctgggttagagagagatgctgtctcagaaaataaggcactgacaaaggaaggcacctgatgtcaacatctgggctacacacacacacacacacacacacacacacacacacacacacacacacacacacactataaatattacaaaaaaaaaaaagaaaccacactgctatttatccacactattttgggcagaaattaagtagatcatccacaatgggaaatgaaataagaggacagcaagcaaagacttcaaaggaaatagttctagggaattatcatcaggttcagatcataaaaccttgaggaaaacttgataataatcatgatatctgacatgcaacttcactttctcagagtatcacacaaaggcatgagataaaggggtctataataaagactgaggctatcacactttgatcaacatctcccaacagattcacatcattccaaggacattttgttgttgtttttttgacacagggtttttctgggtaacagctccagctgtcttggaaccagctctgtagatcagactagcctcaaaagtcacagagatccacctgtctctgcttctggagtgctgggattaaagatgtgagccaccactgcccatcccatgcacatcattgtaaaagttaaaaatgaaattgggttattcacattttctctgacatagctacggagctgtgctctgtaaggggaaaaagtctggagatgagaccacactaaacaaagtgactattttcttccatgaagtcacattgtgtaaaatgctatttacttactcagagtgtttgtgactgtagtgagttcatactgatactggaagatttctgggatggaaagggtgtacagggacagaaaggtagacaagcactggaccaaaagacaatgaagaattcacatggaagcccctagttacatttattggaatatactctgtttgtatgttcaagtgactgaattcatggtagaaacatgtcactctactgtccagcacaaagtttactgcctggtaatgtaaaacatctgctttggaaacttcaagaaaatacacgaaacaatgtataactttgttagagaaatggatttatttactcagaaaaaatgagggctcaatgtttgacttgtctctttcataataaatccaaactatgacaaagtgttgaagtcagatacatgtacacatgcacatgccaagatggtccccgatttataatggttcaaattatgatttttcaacttatgatagtgcaatagaggctaaaaacaagttgaacagaaatttgaaatttaaaggtttgttttttcccagcatgatactcttgtgctgtgaaacagtagcaagaaaccacagagtccagccaactacaggactgtgaaggaaagcagctgcttctgtggtctgccaggtactgaattcagtaaaatgtctgcacagtcagtgcttcactacaaactagtttttatgatagttgactctgtcaaatagtaggcaggacagactgtagcccaaaggttgtgtggctgggtttgtttcccactccctccattgaaagtcctgcctggttacaagagatggttagtttaggctatgcatccatcactgttagaagtcttagtcatccttttagattcctaggaatttcccttgctctgggtttctacttgacccggaaatgccctcctccttccagtcatctctttcagtactctttccatccattcactctgtaacctgatatctcatgttcccatctccacccacacccaattcacctatgagatctcttctactttccctatcccaggagatccttgcatctccccttaggacctcattgttacctagtccttttgggtctgtggattgtggcatggttatcctttactttacaggtaatatccacttataagcaagtacatttcatgtttgtctttctgggtctgagttagctcatttaggatgattttttttctagttccatccattcgccttcgaatttcatgatgttattgcttttaacagctgagtaatactctgttgtgtaaatgtaccatagttcctttatccatttttcacttgagggacatctaggttgttttcagattctgggcattatgaataaagctgttttgaacatagttgagcaagtgtccttgtgctatgattgagtttcctttgggtgtatgtccaaaaatagtatatctgggtcttatggtaggttgactcacagttttttgatttccaaagtggctgtacaagtttgcattcccactagctatgtcggagtttttcccttactccacatcctctccagaacaggctttcatttgtgtttttgatctcagccattctgacaggtataagatgggatctcagagtcattttgatttgcatgtccctgatgactaaggatattgagcatttatttaagtgcatctctggcatttgagattcttctgttgagaattccctgtttacatctgtaccccattttaaaattggattatttgtttttttgatgtctagtttcttgagttctttatatatgctggacatcagccctctgtctgatgtcccattctgcaggctgctgttttgtcttggtagtgtcctttgctttacagaagcttttcagtttcgtgaggttccatttattaattgaacttagtgtctgtattactgatgttctttccaagaagttgtttcctgtgccaattaattcaaggctatttcttactttctcttctattaggttcagtgaaactggatttgtgctgtggtctttgatccacttggattttgtacatcgtgatagatatggatctatttgtattgctttaatgctgacatccggttagaccaatacctcttgttgaagatgccctctttgttccattgtataattttgccttttttttgtcaaaaatcaggtgtccataggtgtctggatttttatctgagtctttgattcaattccattgatccacttgtctgtttttatgtcaataccaaactgtttttgttactatagctctgtagcagcgtttgaaatcaggaatggtgataactctgggagttcttttagtgttcaggattgtttttaaggtttcctggtatttttttccatatgaagttgagtattgttctttcaatgtctgtaaagaattgtgttggaattttgatggggattgccctgaatctgtagattgcttttggtaagatgtccgtttttgctatattaatcctactgatccttgggtatgggagatcttttcttcttctgagatattctccaatttctttcttcaaagacttgaagctcttgtcatacaggtctttcacttgtttagttagagttacctgttgtggaataatctttttgtacactgtgaagatgtatcattctgaattgtttaataaaaagcggaatgggcattagctagacaagattttcaggcacacaggacactaggaagaagaatggagagttgccagccagatggagaggaagcagcatgggcagtacagagtaaaagcaataaaaccatgagatagatggcaggttgataaaaatgggttaagttgtaaaagctatttagtaagaagcataagctatcggctaagcttttataattaacaaatcttcacatcattcttggggagccagcagccaactaaaaggtctgaatacagttaccccaagatattttatattatttgtgggtattgtgaagggtgatgtttccctgatttctttctcagtctgtttattgtttgtatataagaggggtactgatttctttgagttaatattgtatacagccacattactgaagatatttatcagctaaaggagttccctggtagaatttttgggatcacttatgtatactatcatagcatctgcaatagtgatactttgacttcttcctttctaatttgtatcccttgttctccttttgttgtcttattcctctagttagaactttgaatactatattgaatagatatggagtgagtgggcagccttgtcttgttcctgattttggtgggattgcttcacttgatgttgctgttggcttgctgtaaattgcctttattatgtttaggaatgttccattccttgtattcttgatctctccaagacctttatcatgaaggggtgttggattttgtcgaaggcttttacagtatctaatgaaatgattgtgtgtttttttttccctcggtttgtttatatggtggattatactgacagatttttatatgttgaaccatccctgcatctctgggatgaagcctacttgatatatatatttgtgttcttagactcggtttgccagaactttattttattgagtatttttacatcaatgttcatgaggaagattggtctgtaactatctttcttttttgcatctttgtgtggtttgggtatcagggaaactgtagcctcataaaaagagtttgtcactattctttctgtttctatcatgtggaacaatttgaggagtattggttttatctcttctttgaaagtctggtagaattctgtgacgtgagatgtccttctgtatgctgcaaatatgtgttgcttttatttgttgataaataatgctgatttggccagtggccagggagaatatagctaagtgggaaatccaaataaaaatacagaggaaaaagtaggcagagtcagagagatgccatgtagctgatgagggagtaacatgctcctccaggtagttattcttctaagaaatgctggacaaccaagtcactgatatactcactgtggggaatgtggttagcaaggacatttcacaggcatatagcactctccacctctccgaagtgaaggcatgggtgtaatgatttcactagacccaagttgaatgataaatgggtgttttattggggaataatttacagagaacaataaagagccatggcagcctgtctctgcctttccaatttgatctgaacctgagagagagagacagacagacagagagagagagagagagagaatgaaagaccatgcctcatgctttcctctttccgattcctgaagccatgcccaaagaggtgtagccactgttacaagttcacagtcaagaggctgctacaccacagtagctgagttccagatccagcctagctgtccatcaacagaagaatgcaataagtaaatgtggctcatgtcacaacaaactttttttaacccataaagaagagagaggttacatcatttgcaggaaaaataaatgcaactgaagataaacataataaaatcaagccagtatcagaaagacaaatcttatacgttttctcccatttgtgggccctatacaggaacataaagtcagcagaaatctttatagttctgaataaactaggatgagaaacaaactacttattcatacttatttaattttttaaagtagcaaagtaatagatctcagcatcacatttttacacatactttgctttgtcgaaccccctcccccagtcacctttcctgtccccctttcctctccttgtctcttcttcccagaagccttcattcctctcccatgcattctgttatcctactatttagccccctaccattctgaaagcctcttttcccacctggtttcatgtgctgtacccatagcaccatatacacatatgcaaacgtaagcatttagaatccatgtgtggggacatgaggtacttgtcttatgagtctgggctacttgctttagtataaaaatgtccagttctatccatttccctgcaaatgtcatgatttcatttttcactaaggttgaataaaattccactgtgtctatgttaggtatttaataatttctagattttaaaaatacatggtggctaaaaaaatacatggtggctaacatactcaattttgaaagtatttaatgcatgcttttatgggcttaaaactggttgtacaaaggtaaataagtcagaaaagatttctgcttgttgtgtttacatcactggatggttcttgggaagaagacccttttggatacttcacgggaatcattcagcattcatgatgaaattatgaaggagggactgctactacccacattctccagataaggaaattgagaacaaaaataactaattagtgcaaggttacacagctactaattaatggtggcaaaattcaacgctaacagtcctttgtgggagcagtcaggagcagagtccagctcccaggcttctgcagggtgcttctttgtataaataatgctttattgaaacacaactatagtcatttgttgttgttggtttttttttttttttggtttttctaaacagggtttctctgtgtagctttggagcttttcctggcacttgctctggagaccaggctggcctggaactcacagagatcctcctgcctctgcctcccaagtgctgggattaaaggcgtgtgccaccaatgcccggcattgttggtctttgaaacaggtctctctacgcaagcctggaactcactatatagatcaagctggccccagactcacaagagatcttcctgcctctgccttctgagttctgggattataggtgttcaccaccatacccagctgctacagtcaatttttagctgttgtctacggctgctttcacttataacagtagggttgagtggttatgacagggactgtgtggcttgtgatgtttactatgtacctattttctggaattaaaaaaagtgtgttaaccattgctatggggccagtcttcatttatatacagatgcttaattaagaaaaactatattaaaatctcatagcaggaattggagggatggctctgtaggttaaagcatatactatactgctcttgcagaggacctgagtgctgttttcagcaccctcaaaggatggctcacaactgcctgtaaccctagctccaggagatcacatgtgcatatcccacacccacagaacttaaaatagactaaatcttaaaaaaaaactcatagcaagactcatttttaaatagcaagtaacagagtcaagcttgtaaaataccagacactagatgggttatccctgaccaccacaataatactgggagatacaaaaagaggagacttggcctcatagattataaatttacacctaacaatggtaaggaattttaatataaaatctattaatacttaaatctagcatgcaggcctatagacacacacctctgaataaagaaagagaagcagaagttagaggttcttctcagctacatagtgagtttgagagaagctgacaaaagttatttcaaaaaacaaagcaaacatactggatttgttggagagctgggtgtgtccagagaactacactagctgctgctgccactgttggtccctgaacctaactttgcacaaataccatgtccatcgcaaacacagtgccctgggatacagcatagatgtccatcacattgaactttagttctacagatacttgttttaagatatccaattttggtcaagttatttaacttcttaacatttttatttttaattatgtgtaaatgtatgccatagcccacaattgcaggccagaagagggcattgggttcactggagctggaatgacaggatgatatgggctgccagatacaggtgctgggaacagaaccctggtcctctggaagagcagtgctgagacatctctctagtctccagttaactcttaaagcctcagtttcttctcctggaacatggaagcaatgatgagtaacaccataagtgcctaactaagcaaagaatttgacccaataatttttaacttattaacatcttttgcaagataaatttttaactgaatttctatgttaataaaagaagtgagcagacaaaatagcccaaccgtttatttttattttactatattaaaaatttaaattagtatgttttatccatgagtaatcgtatgtgtgtgtgtgtgtgtgtggttttttttttttttttgtgtgtgtgacatgacgttcagagagacatgtgacatgtggattctggggattgaactcagatcatcaggcttggaagcatgtgctgttacctgctaagccatcttactgaccttttttggttattgtgagacagtttcatatagccccggctagcctttagtttcatatatacttgaggatgaccttgaacttctgatcctcctgcctccattccctacatacagttattatagggatgtgccatcatgcctggaaactgaaccagggctctgtggatgcgaggcaaggactctgttcagcaacatccctagcctcctggctgtcacctcacttccaactttgtgtggtggtcaagtatggagttctaacacaaagactagacattgctctacttaaaatatccagtagtttccacaagacttacattgcaacccaggcatatctggagccctgatcatcctgcaggctctctctgatgcaaccttctctttcatttctctgcattgcttgcacttctccatcctcctttccgcttcctgggaccaccaaccagtccctgccttaaatcactacaagttgttttctttctcagaatgctctatttttggatcttttatatatttatgtctctgttcaaaggccattttcctagacagagccttcttaactctagtaaaatttgcccacttcctgctctcatcactcctcattttattgtttgctttatttttcatatagcacacattacctattattatactgtttacttatttctctcttatcatctattatttctcactagaatataaccttcaagtcaaggacattttctgtttttttcttcttcttcttctgtatctccatgtccaggaacagcacaagaagcataaaggtggtgggaactcagtaggtaactactaaataaatgaactcactggggattcctgagaagagactctatgtgggtaacattggtctgtactataccccagagagacatctctggagcctccaggaactctgtttctctggtctccaagatgagatatgtccaacactctggggggaggtaatgcttgaaaagccatctaataactgagtattcttgtgattttctaaaaattaagtcaaggtaagctttaccttttgtttagaaaagagtttctgtgaaaatggattctgtctttgtctccctccccctttcaactgggcaataaaaatgacaacagccaagggttcttcttctttttctttttttaagattttatttatttattatgtatacagtcttctgcctgcatgctagcagaggataccagatctcattcaaggtggttgtgagccaccatgtggttgccagggattgaactcaggacctctggaagagcagtcagtgctcttaactgctgagccatccctccagcctcagccaaggcttcttatttctcttattacatattaaagctatctatggtttcatactaggtacacttaagaagaaagtatttctcgctctcaactgtaggtgacatgtttttctcctgtagataaaatgtggtaaatcattattttcctagcagtgcatgtatgtaaagctgaaagccaaaaaggtgacagatgtggggacgacgaggctgtggcaagtcagcgtggagcagtgggtaagtgtacacaacctgcagcctcttggctggagtcaggatgcaggttttgcatttatccataaagagaggataacaacaccttctctgtcagtttactatgaggaataaatgagttagctaatagaaaatacttagaatagtgccaggcatccaacaaacacgagtcacttctgaatacatgaaacacagcaggcactcagctcatgttagctactagcttttgttgagctggcataactattaagagaaagttgtgttttatttattgtatgcaaactgtgtgtgagtgggtattagggcaaaaaagagctgtcctcaaccaagctagaagttcgtacctaggatatagacagggacaccaacatgtgcacagacgatcaagaggaaatgcagtggagtgaagggctgggctgaccaggcacagggtgtgaaatggcaagatgtctgaatcttatttatttatttattttacaaattatgctatagtcataattaattaaattctgtcttgctgtttactaaaagaataaaatattataaaacagtaaatatggcttataatttaaaatttggattctgttgacactggaaataacttttgtattgtttttattttctattatgtaacaaatgcatcaacttaaaaatataattttaaacaattatattgcatcggcttaaccttgtattctaaatttgattgtttgcatattttttgttaaaatgaaactctcattgctgttttagattgatttctgatcttagactcctggagtagaatgaataaatttgcattaaattgttaattattttatttggaatatatgtaacccacaccagtaagaagtggtgtaatgaacacttatgggaacattgccagcttggaaaactgtcaatatcttgacaaaatagagcattagaaggtattattaaataatttttctagcaacagtgaaaacaaattttgtttgaaaattgtcacaatgaaatctaattgtttataagctgataaactaaagaataaaaacaacttttttttctcaaatctttaagacttccactctcctagcaactagcttgcaagtattcatttctctacagagttcccagcatggagggtcactatttatttatcaatattgctatttattctttaagattttcatacatatatacaatgtatcttgatcatatacaccccaagtcctcctcactttcccccaggactctcctaacatgtgccccgtcctcccacctttatgtccccttttcttcttaataacctggagagtccagttagcattggctgtataagcataagcaacccattggtggtcacacttctaaaggaaatgattcctcctccagcagcctgaccaccatagaaaacaaagaaaagtcaaacacatattgaagcttagttggttatcaaaccaacacaaaccaatagttatttgagtttgttctttgactccctccttctcttttagtgcaatagtgttcttaacctggcttttctgagtaccctttgcaaacatgtagggaaagagcattctggcagccatgtttggtagtttcatctaactgaaaaggttaacctcagtcacagggacatgtttgcatgtatctgtaagtcctgattgtgacaaactcaagttcagagacattgaagtgtcaatgagggcatgactggtgaccagggcaatggagatttttaaaaagttattcctggccgggcgttggtggtgcatgcctttaatcccagcagaggcaggtgatctctgtgagttcgaggccagcctagtctccagagcaagtgccaggataggctccaaagctacacggagaaaaaccctgtcttggaaaaaaaaaagcagaaaacaaaacaaaaaaccccaaaaagttattcctgaagtaaaaatattcagaaaaatacttcattttcatataaaaattattttgtgaatcaggatttaataattgggtatgataatgcaagaataagaagctattctttagaactctaagaactgagcaacacaacttaaaaagcatttaaaagagaccacactgggcctatgatattttggtaggtgagagtgtgagccctgtacaaggaggttgcaaatcctttgaaagtagatgctattagaacatggctaaaggaaaatgtgaaagaagacgaagccatagctaggctggtacttgacacagcacaactatgaaattggattgttgaagatttaggaaaaaaagtaacaaaattccaagttaaaggactactcagggtgacaatgtgtcctgttttaatttttctgggattgggatgcccacatttacaataagggcatgcaatatggtgcatccatagagatctgtacgggtgagctgttcttctggccaatggaatagaaataaagaggcatgacgcttgtaagaaagctttgctccagaagaggaatggtgaccaaggacagcatggaaatcacaaggaaacatatattgagaacctcatccatgtctggcattggtctctgtgcttgtagacatgggctctcatttaattttcaccagaactctgaggtaggtgttatacattctgaattttacagtgaaaattctggagtccatatttttcagtgacatgagacagtaactttcccctcatttctttccttgtaccaggtataatggaggaggaaaatcagacaggagtggtatacttccacttccgccccttttcaaccaactccacagtagcttccctcgtgtttgtgggcttcttgctgttgtatctaggaagcctcattggaaacctcaccattgggctcaccgtctggcaggatcactccctccataccccaatgtacttcttcctttttgcgttggccacattagagcttggctattccaccaacattgctccactgactctggccagcatcctctccatggggaagatgcttatctctctgcccagctgtggagcccagatgttcttcttcatccttctagggggatctgactgtgtcctgcttgccgtcatggcctatgacaggtatgtggccatctgtcatcccctgcattacagcctcattatgagttggcagctgtgtgggcagatgactttaggttctctgggtctgggattcctgttgtcactgcctgtgaccattctgatttgccaccttccattctgtggccacaatgaaatctaccacttcttctgtgacatgcctgccgtcatgcgcctggcctgtacagacacccgcatacaccaggcagctctctttgccatcagtgtggctgcagtggccattccctttctccttatctgtctatcctatggttgcattgtggctaccatcttaaggatgaagtcaacagaggggaggcgtcgggccttctccacctgctcctcacatctcctagtggttatcctgcaatatgggtgttgcactctcatctaccttcgcccaagctccagctacaccacagaggaaggcctggcagtatctgttgtctacacctttttctctccattgctgaatcccttaatctacagcataaggaaccaagaggtgactgttgcagtaaaaagacttttggcaagaatgttttggctcaggaagccagaaacattccttcctaggaaaattattcaccaaacaaggagggactgatggaaaggaagctcatatttaataaacagtgacaatggagcagtagttgtgctcattatcaccctggtctgtgaagtgctgatctcaccatcatcccctacttgtattagattttcaatgactaagtcctggattgactcaggctgctctaaggagctgactgttcccccacaggacttagaataaggtctggcagaggaatgttagagaagaaaagaggaaatgaatgaatgaatggagtggtgacagtaggtgacacatgctgtctttctgtcacatttttaaggtcttatagacaccaatgcatctacacacataaatgctcctttgactttgctttttgactttaaaagtctcctgacatcccacttccttaatgcaatcttgccattctatctggtagagctcattaaaaaaaaccagagttatacttctctttataataatgagtttaatatgtcatattaaccctgtaataaaaaacttcttgagacagaaaaatggattattctttgcattttgcccattgctaagtgcatagtaagggattagggtccatcaaacaaagttgagtcctaatctctccttctttaattgtttcattattttatgtgtttgggtggttcctacacatgtatatatgtataccatgtgcatacctggtgctcaaggtcagaagagggtatcagatctgctgggactaggattacagatgtttgtgagccatcatatgggtgctaagagtgggaactgggtcctctgcaagagcaagcgcccttagctgctgagtcttctctctaacccctaatcgctcctttatcttaaaagtagacagtaataatatctatctatctatctatctatctatctatctatctatctatctatctatctatctacctacctatctaatctttggaaacagacaaagttacatttgcctttagttctagcactttggaggctgagacaagaaaatagcttaagctcaggagactggaggagaggccttagatggaggattgggaatacagaatatatatatgtttttcaggataaagtttctttgtatagctttgtagaccaggctggcctcaaactcacagagattcacctgcctctgcctcctgagtgatgggattaaaggcatgagcccctactgcccagcctcaagatatctttcttaaaaagatgagatggaacgtatcagtgggttcaagtgcttgctgtgcaactatgggaatctgggtttgaatcctgagtacccacataaaaatccaggcatggccaatgtgtgcctgcaattccatgcttgtggcgggggaaggggggcagacaggtggatcactgagccttgctggctgccatctagctttaggttctgagaaaagcctggtctcaagggaataaggtggagagttgtagaacagaacaattggccttagtgtgtatgcattggtgttcacacctgtatacttacaggtagttatgggtccctgacatgggtgttgggatctgatcttgggtcctctgcaatagcagcaagtgtccttaacctctaaggcatcgctccagccctcaccccattcttctcttaactttacaaatacatcacaatggatggtaacagacccactatcccttgtctgatgcaaacacacaagtcagggggagaacagggaagaacaatatgaaagcccaatggcaagaattcctgggtctgtggccaggtgaaaacaccaagacgcatggggccatgcaactattttcattaattctaataagaaggacatctaatgaacacttcatcactagccatgctatttgttgaaattaatgaagtctactttagggcactatatcctcaatagcttttcaaataagatttgaagtagctcaaaaatacttctataaaagttaaaatgacaaaatcaaaaggattgggttaaagaagaaaattcaagcaggattttaaagaactcagtagtaattttgctattttaaaatacacttctgcagatttgagagtgctctcctacatgtctctgtatttcataatagccaatggaaacaataaaatacaattaaatttgaggatactagcattcacctaacagcaaacaattatatggagacatacatacttttgctgggtaacactcagatttaacaggatcatttcccacagttttcaaagaggatactacataccaacattcatagcattagctattattcattgcacgtttacgtatgcaactgataatatcttagctacttagtaagtgctaactcatttgatcatcacaaaatcaccctcatgttacttgcaaagaaccacagtatacagaggttaaataattctcccagaatcttttacctagtaagtggtagcaccatcttgtcccagagccaatggcttcaagacaaaatgaattttctagcattagttttcagcacgggctgagggggtcactaagggagttcagccatggttcacaatcaatgaaaggttttctaagtagagtttttaggaaaagaactctgaagtgtgaaagacgaatgtggtagcatctctgccaggaagagcttcaccaacagttctatgcaaaactgactgtagcagtagagaagagaacccccaggctagcttacactcaaatgttggaacatatatattctgcaataataatgagccaagctggtttacattcactgtgtaagacttacatatgatcagtttcatttccttcattacacgtccattgccatgctccagtttcataatggagttttaatgggattacatttgaacaccatgaaataatgacattatgttctaatttaatttatttttaattcaaaaataaaattgtggtctgagcttgctggagtgatttatggtggtattagctatgtgaaggaaatgactctgttactaattaatttttagaaggcagttatttatggaaactagatatttgtttatttaatttaaatctgtttttatctactctgagaaattcacacacatttatagtgtattttgatcatattcaccctctgtttccctcctctcctctttgtcccacctcccaacttcatgccttcttttcttcttctttttctgttaaatagtccaaggagtctagcgatgtctgtatgtgcatatatttagggccgtccctgaagcatggtcaacctaccagggaccatactcctaagaaaactgacccctggaagtcatcaactgtcaatagctccttagccaagggtagaggatgttgagctcctccccatccatgtgctgatgctgtcggcttggtgttgtgtgggcaactgcagctgcttcgaattcagagtccaacggtttccgtcatgcccagaagacactatttcaccagacctctggttcttaccagtctttctgccccctcttctgtgatgttccctgagacttggggaggcggtatgatgtaaacatcccatttagggtggatcactccacacgcatacttgttctggattttgatcagttgtatctgtattaactgccatccactacacaaagaagcctttctgatgacaactgagagctgcactaacccatgcacatagagaaaagtatttagaaggcattttgtactatgtccattcagtaaaattatagtagtatgttcaccccagagcctatgagctccctggccatgggttcttgacaagattttaagtaagagtttcctcctgtggactgagtcttaagtctaatgaaaaagcagttgaatatacctatgtttcatgctgttattgcacacatgcccatatattgcctggctggttgttatagttcacaagattcacagctatgtgagactgctgatgaccccacctccctcccccgccaaatgcttgcatagcaccttctagtactatgcaagcaaaccatcagggaagaagattccaggtcaataccagtttgatttctccaaatcctgtgaccaaaggcaaccaaagcgtgtccagctatagtgtcttatcctcaggctctagtggcaaacaagaacaatgactgtaagtggtgttgtcttggatgttgtggaataatctttttgtacactgtgaagatgtgtcactctgattggttaaataaaaagcagaatgaccaataactaggcaggatttccaggcccaggggacaccgggaagaagaagggggagttgccaggagatgcagaggaagcatgacatgtaggtgatgaggtaacaagcctcgagccatgttgtggcagcatatgaattaatagaaatgagctaagtttgaagagctagttagaaacaagtttaagctaaggccattctttcataattaatgtgtctccatgtcattatttgggagcttgtgggactttgagaaagacttgctacacttggaggtctctgagatcctgccccctccgccaacaactcaaagggtggtaacccacacctttttgtctgataacctatggcttctgggagaaacatgaacactaggattttaaagtgaaattttcaggtaggctgtggaagaacattagacagcctcttgttgacacctctgtgtttggtggaggaagatgtgataaagtcaacaatcctggtataaaaattccaggtcatctaaggaacaattgtacaagcttcaacaagtcagtttacttctgtgaactggggtttccttatttgaagtcttgagcaaattcacacagtgaagttttctaaatgaaaacgaaatataaacggacatttataaacataaaattatggagtaaatgacaaggacaatgttattgtcctcactatccatcttttcgtcttatctgtttgtcattatcttgtttgtcacctgatattgctcttcaaagggaggcacagtcttccaccatcttcccgcagaaacatagtcctcctccagttcagatgcaccaacttcatggtactgggtttgacatcagccacgctccagggaagggccaggtgatttctgtggttttcatgtttatcacccctctgttgaactgcctgatctctgcttgagaaaaacagcttgagaatgctcttgggaaagaaagaaatcacaagattcttttgtttcttagatttacttatttttattttatgtgtatgggtgttttgcctaaatatctatatgctcacttcatgtgtgattggtgcttgcagaggccagaagtggtaacgattccatcagaactggagttacagatcattgtgagtcatcatgtggcaactggaccaggttctctgaaagagcagtaaatgcttgtacgtgctgagtcacctctccagcctcaaatagcaagtttcttgctgctcagaacacaatgagtctttctgtactgagtcaatcaagaattatttttacacatgcgaactgtacagaaggcaagaatctaaggggagaaagacctctactttcaggaactgttggaaattctattgctattcttctttgctatatctctcttttttgttttaaagctaaaacaatttatttttgtttttttgagacagggattctctgtggctttggaaactgccctggaactagctcttgtagactggtctcgaactcacagagatccacttgcctctgcctcccgagtgctgggattaaaggcgtgcaccacagtgatctgtttgtgaggtcaacagaaaggacaaccaagtgatatagatagcaaaggtctctttcactgcagaatctgatctcaggaatcaagggctcctttgattctattttcccctagaaatgagatccagtacttgattttccagaaatttctttacatttttctaagacaagactcatgtatcttagactgtcctctaatcctccaggtagctaaggatgacttggaacttttgatcttcctgcctccacctccttggtggagccctgggattgcagacatgaaccagtttatgtaatgctggggattgaacccagggtttagagccctccaggcaagcattataccaagggaactacatccacagcccttcatttttaaagataagagtaaagctaaggtgattattttgccatgatggggatgtctttctgtatgctgtgaatatatgtttctcttattggttgatgaataaagctgttttggccaatggacaggtaggatttagccaggtgggaaatctaaacagggatagagaaagattgaaggcagagtcaggtagatgccatgtagttgcctatgaagcaagagacccgggcatcgccggtaagccaagaccatgtggagatacacagattaatagaaatgggttaataattaagagagagctaggcaataagaagcctgagtcatcagacaaacagtttataattaatatgagcctctatgtgtttatttgggactaaatggctgcgggattgggcaggacagaaacatctatcaacactgccatgttccagtggcactaagatttcagatttatcaaatgttgctgagataccattaggaattgcattgtatgttctctgattacagtacaaattagcatttcttaaaatcctagataaggtaattttcccttatataacatagaaaatttaattccacggccaagatgggaaaatgactaattcactctctatttgtttgtttgtttgtttttttttttggttttttgagacagggtttctctgtgtagctttttggagcctatcctggcactcactctggagaccaggttggcctcgaactcacagagatccacctgcctctgcctcccgagtgctgggattaaaggcatgagtcaccaattcccggcttcactttctatttaaacacttacaacatatactttagaagttccagaatttcttagaatatttggttataagaaaaatttctttctttactatgtgttatttgaatataaagaaaatgtttttctcagatactcagagtaaaggttatatgataataaactaatacttgaaaaatggcagtagatagaaagataccttggtttcattggttcccaagtttccactggaactaaaaagaattaaaagagtaacatgtatcaataagaaggttgaaacagtagagtgcttgatgagccagcctgatgatcttaggtagatccctgagacccacagtggaaggagggaactgattcccaaaagttgtcttctgatgttcacatatgacccatggcatttgagtttgcagtcatacacacacacacacacacacacacacacacacacacacacacacacacacacactatactcacatgtactgataataaagcaaaataacaaaaatccaataatataatcaattgtttttgttgtgaaatttagtgctccactagtcttttaaaaatattttatcaattattattattatcagtgtgtgtgtgtgtgtgtgtgtgtgtgagagagagagagagagagagagagagagagagagagagagagagagagagagagagagagatctgtgtgatctgtgcataagagcaggtaggtattcatgccatgatgtgtatgtggaagccagaggacaacttttgggagtccacttctttttgcaccttgtcaaggcagagttatcttttgcttctattgccctgaacactccagaatgcttctgggtgattttcctgcctctgccccccatctccctgtaggattgttgggactgcagatgcaagtcactgtatttatatttttgtatatttcagtcaccaaagtaaaggttattggcttttacccaccgagccatcccataggccttcaatgttcttaagtccatgtctctattattagcaagaaaactgatctttggaccacacatcaggtactggagcattttgacttagtcttcctaaagatatgagacatgggttttgatcaagttcctaaggaatgacaggaatacaggctacctaccccatatcagattatagagacacagcaacttcttgtatattgtgtttactgtggtttggcatttgttttgggaaaagaagtttgcaatggtagggtgatccagaaccacagtgaaccagtggagaatttgaagagagtaccttgggtgaaaataatgcattggtcactgccacttctgaatctcttggagtctgactcttgaagataggtaagaagatggctgaagggtggtattacctgtcaaggagtgactggatttttctatacaaagctttcaaaaatgggcatttttttagtatacacaacctgaaacatattaaattcagcaaacataaaatgacaggggtgtaggaaaaataatagagaactggccaaaccctgccttctgcataattcagggatgatgttaccgtcttgcccgtttctgttactcagggagaataaaaataatttcatgactaaaatatagccaaatctagtaacaattaaaccaatttacaagatcatgtccccaaataattcctatttgtgttcaaagacctactggggctggtccagtggaaagccaagtcagcctcctggggcttggtggagtcaaagtgggcagggaattctccagaaatgagatgaagagtgagaacagagaaacagcccagagttccagctccacaaatcccaagtcccgtgttcttccctggtgaaggggcagtggggaagagctggtgtatggaagtgtgtgccatccttagaggaaagggaagtctcagaggttctgctccgtggttgccaagccattagaaggaccacagcttgagtttcagtcagccttgggttgaggatgtggtgccaggtcctccaggcagaagaaaggaaggaggcagaggagacctttgtgagctgctgtgtgttctagaccctggggctgggccaatgaaagctcctgagaggggctttctggtgttgaatcacagataacctggagtgtagtttaacctcctatagctaacgaggagtctccagttttgtcactgtgaatgtggggagatttttctttcactcatcaatgccttaaatgaagacagaactcacaagagtaagttttttaaaaatttttatttgtttctttgcagacaggaataataatgatcagctatgtttttgggctttgttggatagcagtcattataggaccaagcacagagtattaaagagaaatggcatcctcagatgcctgcagctagaaatagtaagatatatttgttaatttattgtaactcaaatgttttaaaactagaacatttgaaataaaacctcaaaaccaaaaatatactgtatatgataaaaataaagagaacaatagtatctatttagtgataattttgggttaaggaagtggttctcaaccttcctaatgctgcaactctttcatacatttcctcatgctgtggtgacctcaaccataaaattatttttgttactacttcataatggtaattttgctattgttatgaattgtaatgtaaatatctgtgttttctgatggtcttaggtgacccatgtgagaggatcactaaacccccaagaggttgtgagccacaggttgagaatcactgggctaaggaattttcaccaattgactataaagcttattttaagtgtcccagcaactaacccaaaaaggaaaagacaagttatatagcaatcatggttaaatgggatgttgtatgtatatccactctaagaagtatgctgtaactccaggagtgtggtacatacatgtaatttcagcaatcactaaacaattaagaatcttgagttcaagaccagcctcagccacatggctagtatatcctctttgttcttgtcctcctccccttattttccccactctttcttccttctcctttctttttggtgacaggatttctacataacttggctgtcgtggaacttgctctgtagatcaggctggccttagaactcacagatgtcctcctgcttctgcatcccaagtgccatgattaaagatatgcatcactacaccctggagccagtacacaaaataagctgtatgtagtattttgtctctatgatacccgaacttgggaggctgaggatctccacaaaattgaagtgatcctgggctacaaattgagttactggctagcttgtgctttattccctgtctaaaacaaaataaaataataacaacccaaacaagcaagcaaacaaacaaaaacctcaacaagaaaactctaagaaaatcaaaccaaaccactctaataaaaaaagaaagagacgcctgtgctgatggagacatgcgtacaatgggaacaaacgtaagcatccctcttgaaacagaagaaacttgctgagaatctgagtcttaggcattataaatgggaatttaaatcatgttttttatatttaaaatacatagaataaaaataaagaaaagcaggaagaaatatcaatgtcccaattctctcaaaaacaccattgagagtctgaaatttcctttcagagtggtgatgtgagtgatgcaggctaggtacgtaacttgtgtaactctttcctagccagcattatgtaataaggactccttctgcttctgaaacatgaagattgtcatggtgatataatggttggtaacacccttgcccaacaaaatgcctgtgatgttatcttgtgttagtgtttgttctattttgattttaagaaagaagccaatggtctcttggcttggcggttaagggtgctcaccattcttgcagaagacccaggttctgttcccaaacaacacatagagggtcacagctgcccacaattctaattccagaggatctgatgctctcttctaatctacatagactcttgctttcacatgggtgcacatacatatactcaggcacacacataccccacataacacacacacacacacacacacacacacacacacacacacacacacacacacacacacacacacactacaaatattacaaaaaagaagccacactgcatatgtatgcacctggcttcatgtttagattacgtcattaggaaatcctctttggcacagagtttttattcaatgcatttaacactttaaaacattgttgtggagaatacattttttttatttttaatctccacaaaaggagtatcccaatagaatctaggtactgaaataaaagtgatttgtttcatagacattggacatcactgccccctataaatatcactcaataaatgttttatttacatttattttcttattgtgtatgtgtgcatctcgtggaagttggttttctccttccaccatgtgggacatgaggattaacctcagttcatgagtacctttacctgtagagccctctcactagctgtcactcagtaactcttgtatgaatgggtacatgtttatagactaccagacactggtttcagttgtgggcatgagcaaaactcaaagttaattgctgctggtagggatcttagagccatggagaaatggctacaaatgaacaccgaagtgaatacatcattaaaggaaaggagaggctcctgttaggtacaacagttctctttttggtcactgactgtccctttgtgtttgaccacagagaccagatgcttgatgcaaacagtgtgctagttatcatcatatatcttgcacagatatataatgtgtataatatagtttggagtgtgtgttcccactgctgctcacaggaaggacactcacaaaatagcatgctcttggaaaattgcagaggaagactggtctgccactatgcctgtaatattcttttaattttattttttaaaagattttatttatttattatgtatacaacattctgcttccatgaatatctgcacatcagaagagggcaccagatctcataatggatggttgtgagccaccatgtggttgctgggaattgaactcaggacctctggaagaacagtcagtgctcttaaactctgagccatctctcaagccctatactttttatttttaccattttttatttttttatttcattttacattccaaccacagttctccctccggcacctcctctgttcccctcacctccttccacccttctcgcctccccccagcccacccccagtccacatctcctcacaggtaagggctctcatgaggagtcagcatagtctggcacaatagactggggcagggccagggctctctcccatgcattaagactgagcatggcatcgcaccatggggagtggattccaacaagctagttcatgtacagggataatattgtagtcctactgccagggatccctcagctagtccaagctttacaactgtctcccacatacaagtggcctagtttggtcccctggagtctccatagttgtaggtctagagttcatgagtttccatgagcttggttctgctgtctctgtagatttctccatcatgatcttgacctctcttgctcatatactgccttttccctgtcttcgactggattcccgaagcttggcctggttcttggttgtgtatctctgcatctgattccatcaattactgggtgagggtgctatgatgatagttggggtatttaccaatctgtttgcaggggtaggccaggtcaggcatcctctctactattgctaggagtctagctggggtcctccttgtggattcctgggagtgtttccctagcaccaagtttctccctaagcccatagtggctctcactattaagatatctcttttgttgctcttccactgtatccctcctgtcctcagtcatctcattccttcctgttctcttccccactcccagtttaccctgtagaacatctaattttccttctcttagagttggtagaatatctacccaggtccttctggttttcagagtttccatggagaagtccggtgtaattctgataggtttgcctttatatgttacttggcctttttcctttgttgctcttaatattctttctttattctgtatgtttggtgttttaattattatatgacgagggtactttcttttgtggttcactctatttggtgctctgtaggcttcttgtactttcattggcatgtctttctttaggttgggaaagttttcttctatgattttgttgaatatgttttctgcactttggagttggatttcttcaccttcttctatgcccattatttttaggtttggccttttgacggtatcccatatttcttggatattttgtgttagagatttgttgggcttaagattttctttggtcattgactctatttctcctagtgtatcttcaatgcctgatattctctcttccatctcttgtattctgtcggttatgcttgcatctgtagttcctgattatttacccatcttttctaattccagcattcccattttttttattgtctctatcttggctttcaagctttgcactgtttgaattgtttcttgcaatttttggtttgtcttttcttccatttctttgaaggattttctcatttcctctcgtagggtctctatcatctgcatgaagttgtttttaaggttgctctcttctgcttcatctgtgttgggatgttcaggtcttgctggcgtagagttcctagactctggtggagtcatattggtttctctgttgttggatgtgttcctatattgtcgtcttcccatctcttcttccagtgggtgcaggtggtgtctcttcctttttctggtgtgtgtgggtccaagtttctcttctggtgggtgcaagagggtctgatactctgatgggtctcaaggtgggtgcaggcagatctgaggcccttgctttccaggtggttgggagaggggatagcacagagatgtcagcagactctgggttgcttggtcctcaggggctaagtctacctgcctgcagactccaggacaaaagttccctgagtgggcaggcagaagttgggcctaaggcaggggctgaaacagcttacctctgccctgagtgtggggcaggagtagcccagcgatctcatcaagcagactcagggttggttggtcctcaggggctgagtcaacctgcctgcagaccccatgacaggagttcccagagtggccaggctgaagttgggctcaaggcaggagccaaagcaactcacctctgccctgagttgggacttttgtattttgatgtttagtttcttgagttctttataaattttggagatgagccctctgtcagatgtggagttggtgaagatattttcctattctgttttgttttattgacagtgtcctttgccttacaaaagcttttcagtttcaggaggtcccatttattgatggtttctttcagtgtctatgatactggtgttatatttaggaaatggtctcctgtgccaatgcattcaaagctacttcccgctttctcttccatccaatgtagttggatttacgttgaggtccttgaaccacctgaatttgagttttgtgcatggcaatagatatgggatctatttgcaatcttctgcatgttgatatccatttatgccagcaccattttttttgagacagggtttctctgtgtagctttggagcctatcctggcactcgccctggagaccaggctggcctcgaactcacagagatccacctgcctctgcctcccgagtgctgggattaaaagtgtgcaccaccaactcccagagccagcaccatttgttaacaatgttttcctttttttctttgtaccattttggcttctttgtcaaaaatcaagtgtccataggtgtgtggattaatgtcagggtctttgattcaattccatttatccacctgtctgtttttatgccaatagcaagttgcttttattagtatagctctatagtagagtttgaagttagggatggtgatgccttcagaagttcctttattgtacaggtttgttttggctattctagttttttgtttttccatatgaagttgagtatgttctttcaaggtctatgaagaattgtattgggatttgatggggattgcactgaatctgtagatcctttggtaggattgccatttttattatgttgactctacctatccaagagcatgggagatcgttccattttctgatatcctcttcaatttctttctttaggaacgtaaaattcttgttatatatgtcattcacatgtttggttagaattaccccaagatattttgtatttgtggctattgtaaagggtgacgtttctctgttttctttctcaagcctgtttataatctatatataggagggctactgatttttttgagttaatcttgtatcccgccacattactgaaggtgtttatcagctgtaggaattcctggatagagtttttggaatcacttatgtatgctatcatatcatctgcaaatagtgatagtatgacttcttccttttcaatttgtatccccttgacctccttttgttatcttattgatgtagctagaactccaagtactatattgaagagatatggagagagtggacagacagccttgtcttattcttgattttagtagaattccttcgagtttctctgagtttagtttgctgttgaattgctgtatattgcttttattatgtttagatatgttccttgtatacctgatctctccaagacctttatcataaaggggtggtagactttgtcaatggtttttccaccatacaatgagatgatcatgtattttttctttcagtttgtttatatggtcgattacattgacagatttttgtatgttaaaccatccctgtatctctgagatgaagtctacttggtcattgtggatgatttttttaaatgtgttcttggatttggtttgtcagtattttattgagtattgttgcatcaatgttcatgagggatattggtctgtagttctcttagttgtgtctttgtgtggtttgggtaccaggattactgaagcctcatgaaaatagtctgacaatgttccctctttctattgtgtggaataatttcaggagtattggaattagctcttctttgaaattctgatagaattatgtcctgaagccatctggtcctgtactttatttttttggttgaaagacttttaatgactgcttctatttccttaggggctataggtctatttaaattgttaatctggtcttgatttaattttggtatatggaacctatagggaaaactgtctatttcttttaaaatttccaattttgtggagtataggtttttgaagaatgatctgatgattctctggatttcctcagtttttgttgttatatccccttttcatttctgattttgttaatttggatattctctctgccttttgtttagtttagataagggcttgtctgtcttgttgattttctcaaaggaccaactctttgtttcattgattctttgtatttttctctttgcttctattttattgatttcagtcctcaagttgattatttcctgttgtctattcctcctgggtgaattttcttctttttgttctagatctttcatgcgttttgttaactcgttagtgtaggatttctcttacttctttatgtaggcatttagtgctatgaactttcctctcagcactgctttcaaagtgtcccataaatttgggtatgttgtgcattcattttcattgaattctaggaagtctttaatttctttatttctttttttgacccaggggtgattcagttgggcattattcagtttccatgagtttgtaggttttctagaatttgtgtcgtgttgaatgttagctttaagacatggtgatctgttaagatacagggggttattccaatttttatatctgttgagatttgctttgtaactgagtatgtggtcagttttagagaaggttccgtggggttctgagaagaaggtgtatttttttttgtgtttgggtggaatattctatggatgttaagtccatttcagtcataacatctgttagatcccttatttttctgttaattttctgtctggcagacctgtccactggtgagagtggggtgttgaagtctcccactattagtgtggggcatttgatgtgtgatttaagctgtagtaatgtttctttttcaaatgtgggtgcccttgtatttggggcatagatgttcaagattgagacttcttcttgatggattttttttcctgtgatgaataggaaatgtccttcatcatcccttttggttacctttagtttgaagtctattttgttagatattagaatagctacaccagtttgcttcttaggtccatttgattggaaagtctttttacaaccttttattctgaggaaatgtctgtctttgaagttgaggtgggtttcttgtatgcagcaaaaggatggatcctattttcatatccattctgttagcttgtgtcttttcataggtgagttgaatccattgatattaagggatatcaatgaccagttatttttggtggtggtggtggtggtgtgtgtgtgtttcctttttgtaggatttggtggtatgggattatctatttcctgttatttcctgggtacctctaacctctttgggttggagtttttcttctagtgctttgtgtagagctggatttgtggataggtgttgtttaaatttggttttgtcatggaatatcttgttttctaaatctatggtgatcaaaagttttgctgggtatagtagtctggattggcatccgtggtctcttagagtctgcataatgtctgtccaggaccttctggctttgagagtctccatcgagaagtcaggtgttattctgatgggtctgcctatataggttactttacttttttcctttgcagttcttaatattctttctttattctgtatattttgtgttttggttattgtagccaaagaactgttttttttttttttttcagcctatttggttttctgtaagcttcttgtatctttataggcacttccttctttaggttgggaaagttttttttctatgactttgttgaatatattttctgtgcttttgagctggacttctccttcttccatccctagtattcttaggtttggtctttttatggtgtctcagatttcctggacattttgtgttatgactttgttggtttaatgttttctttgacctatgagtctatttcctctattgtatcttcagtgcctgagagtttctcttccatctcttgcattctgttgtctaggcttgcatctgtaatccctgttcatttacccagattttccattctcagaattctctcagtttatgttttctttattgcctccatgtcaattttcaagtcttgggcttgtttgattgttgttttcttgggtttatttaagggatttattgaattcttccaatttttttgcttgccttttcctccatttcttttagggaattcttcatttctttttaaagggcttgtatcatcttcataaagttgtttaaaggtcagtttcttctgcttcttctgccttggaatgttcaggtcttcctgatgtagtactactaggttctggtgttgccatattgttctttaggttgttgaatgtattgttgtgttgaaatctacccatttctttttccttttggtgtaggcagtgtatttgcctcttaattctatcctctctgtcctctctcttagtcctctatgtgcagtagatgtgtgtgtcccagattgttgttgctgaggtcactggggatgggtgggtttggcggcagagtaagggggctgttggtgtagcctgcctgcaggagactttcctgctgatctgctagtgtggctgaggcctgccatattctaaccctgtccacaggtaagttatcatcagatgacagcacagaggtgaatgtctttagaaaggagaaacaacatcacttcaaatataggcttggagtcatactataagaggactggcttgttgaacactgtaaatacttatacagtaaatacttaaaggaaaagcagcaatcagtaggaattccccattatgcaaaggagcagtggccttccacgattgtcgcatgtgcaaaggtcatggtgtgtcttcaggtaggagcgcagcaaatataggcaaagacacattcttctggaatgctcctgacatcttgtgtggcttcactgttaattcagagaaccaagtacacagtagtgttttctgtctgccgtggcaggtcaagcgtttagtgtctgcatccagcatgtccaaatgctggtgttaaagttggtttttagatgaggacatggcacaaaagccctgtaaagggattagtgctcctctagataagagagtgggtacagtttcttctctgccgtgtgaggatacagaagaaggaggcagcaatctatcatccagaacaagggtcctcatgtgacccaacctatggctaacttaaacttgggatccctgcccttgagggttgtgagcaatagaaatctatggtctaagtccctcagtcaatgatttttaaaaaatatcctgaactaagacaagggttgactcacttccacaggaaataggatagtaacgttgtgtgtatatgcatactgacttgttacgttttgtgtatttcttatgtctaacttattaactgtgtaaacttgcagtgaaattcatttctatagttacagtcatggggaaaaatccataaataagaaagcttaaaaaatttaaaatataggaactttacccctttaagaattctgtagttgtgtataaaaatctgctgtaattcactaaggacaagaattagtgttgggttcatttgcagaggcaagggcagaattcaaggaacccatgagggatgatgaggcacacagggaccatgactatggaaagtgttatttcccccttgagcctcaagtaacagggaggagaaacatgtcattgaaacctaggcatacccagcctaggtagatagcttactcactcagagctgtggtcatagaagcaagggaaagagagagaaatgtaagagtgactttacagggaaatgcctcttacagtttacctctacaaatcagacatcaccaaaactggaaccaagttaacaatatgctttgagatcatttagaaccatgtactccttctgcttacacatcatgtactcaacctgtttagaatcacctgacctcgtggggggacaatgtgatcaatcttaactatgctttgggctccaagtgtaactaacttttacaagttaagatgaataaatagctttaatcttgtactgtgttctgtatggtgtttcccatttctcctttgtgacgtattcatgcacctatctcagaacaatgtacgtgttaagatgtggcaatttgacttaagtccatttaccattgaaaacgaggcctactacaaaaatgttcaaagcaacaaagctgatgacatctgtttgtggctttgtgtactaatctgtgttagtagggtctgaaataataataataataaaaaacgcagtttcttcccttatgagacttctgtaaaggattaaggcaaaagattctccttccttatctgtttgctatgctgttcaataaacagagaggagagctgttgttcagagatcagaactccaggactggtcaggctcactcttgatttaggtgactcttgagttagactcttgtgttatgcagctccagcctagaggaggatgtggcatcctacgtgagggatggatgctctgtctctctgtgctcttttttattctccagcctattcctctctttgagccaatacaataagaagccagagtgtgagagacccatctgatgcagtccttagagattgctacagggtatgggaaggtagagcatggatctgaggccagctggtgagtagccaaaaaagccttgcctgagtcatgaccagagaggtgggaatgggctagtgtcactgcatccagaagtgaggaatttccaacaggtttggatacacatagatgtcaaaattatctgtttgcttcaggaattgggaggtccttgtgaccttcggtaagatggtttcaaggaacagagacattcaatattatagactacttgaaataaataataggaaatggtctgggtggtggtggtgcaggcatttactcccagcactcagaaggcagaggcagacggatctcggtgagtttgaagccaacctggtctacagagtgagttccaggtcagtcagggcctcacagagaaaccctgtctccaaaacccaaaaccaaaaaaaaaaaaaaaaaaaaaaaggaaagaaaagaaaagaaaaaggaaatagttgttatagaaaggcgacacagagattttgttggtcattgtttttaaaacaggatttcatttagctcaggctagctttaaaatcactcttcagctgaaggtgagcttaaatttctaatcctcttgtttccatttcctaaactctgggatagcaggcatagaccaccacgcatagcaagaggctttgaaggatgacgtaacagtggcacaattgatttatattatgggaaataaggttgctctagaatggaaaacagcactagatattggaggctgagcaaacaccttattaaacaagatcccagactaagcaaggggactgagagcattatctgtacagaagaaaagaagtaaaacctaggcatatgagaaaatgagatggccttaagggtcagcaggaaatgctatgttcagaacctatgagaataatgacaagtatcctcctggtgcattctgtctatcctcaggggcgtcacctgtgccagtagcagacccaatgcactaagtacatggaagaagggaatcagactgggatggttctcttccacttccgccccttctcccgactccccgaggtgcagatgctgatctttgtggtctttctcatcatgtacctggtcagcatcggaggaaacatgtccatcgtcctcaccatctggatcaatcgctgtctccacacccctatgtacttcttcctggcaaacctggctagcctggagatcttctattcttctaccatagctcccctgactctggccagcgtcctgtccacagagagaactgtggtctccctggcaggctgtggtgcccagatgttcttcttcatcttcctgggcagtgctgactgtattctgctggcaatcatggcctatgaccggtttgtggccatctgttaccctctgcgctacaccctcatcatgagctggcacttgtgtgtccagctggccctaggctcactgtttctgggtttcatcttggccatgcagttgactgtgctcatcttccgtctgcctttctgtagcagtaaggaaatcagcctgttctactgtgatgtcctccctgtcatgaggctggcctgtgcagacacccatgtccacgaggccactctgtttgtggtcagtgtcatcgtcctcaccatccctttcctcctcatcactctgtcctatgtcttcatcgtggatgccatcctgaagatccgctcagctgaggggaggcacaaagccttctccacctgttcctcccacctgactgtggtcctcctgcaatatggatgtggaagcctcatctacttgtgtcccagctctagttattctcctgagcggggtcaagtagtttctgtggtttacacattcatcacccctgtgctgaaccccttgatctatagcatgaggaacagagaacttaaagatgctttgaggagagtgataatgaaattgcttttggtccaaacacaagaaacattctaaataattgtctaaaaatcccgagttgaacatatgcagtatgaggaagtgggggctgatatatcattgttttgctactgttaatttcatgttttatatggctagctttgttttaaaggctagtttcttttcctcagcctcaggttagtcattttggaaagtggggatgacaatacctccactatttaaattctaaactagtcacaaggatcaagaaatacactaagagaaaacagttggtctctctctttttttttttgaagaagcattggaatttattaaatatagaaagaaggacactaagggaaagattaaggcacacctgaaagagaggtaagggcttttctaaagagagttgccaatgtactacttagtattttaaatatttatttatttagtgtgtatggatgttctgtttgcataaaaatctgtgtacatcttgtgtgtttgttgccctggaggccctggaactggtgttatagacagtttcgagccaccatgtggatgctgaaaattgaattttggtcctctgaaagagcagctaatgctcttaactactgcgtcatctctccagactctagaagtatttaaaaatttgttctttaataattttatgcatgtgtatattgtctattttgatcatattcactcacattaccctcttttattcctccactccccttgaacctgttttctccaataaattcctgtcctactttcacagtgcgtgtgtgcgtgcgtgcgtgcgtgcatgtgtgtgtgtgtgtgtgaatgcatgctcatgctattaattttactttatgttgcctgcaggaatgtgggtgcagttatttactggagcatgggaaacttaccagtggctacaccatagatatgtcatatccagtaaacaagtgtttcacagcactcctccccatcctgtcatttttatgttctttctgccccttattccagggtgttccccgaaccttggagttaaataaagatataacagtgttattattactttcccagacatcccatgtcacatctgtgtcttactctgaacttttctgtagatactattctcagattgtcatcaatctcaaatattgtacctctggaaagggttgaagccacagtaagacaagacccaaactgagaacattccagtctctgtaatgactgctactgtgtaaaatttgaattttaaaagttattaatatttcttcctaatttcttttcatgggaaagattctggggaaaaccatggagttccatttctattgcattcaccttttaagtcattttatttggagaatgcatacattcatctcaacttgtctctaaattgtgaattctgtcctttaagttagtttccccctttctctttctcttttccccatccctccttccagcctctgcctcctcttcttcctcctcctcctcctcctcccctgtttatcactagctgtatctacacaacatggaaaaccttctttgttacttgagctcctctggagttggagagaggaaatgctggttcaattttggagccacataaaacaaatctaatctgtaaagatagacacagaatggacactttgagggaagggctctttattatgattcttagtaggtgttgtgtgacaaaattgtacccaaggagatacaacatacacatctactcaccccagatagggaacccacaacagacagaaatatggataccaccaaagtccatctggatgaaccaatgagttttattgaggttacgtacaggaaaatgggtgaaaggttaattactggagcataaatgagtcttctttgtagcttagcttttcggagagagactctcagtagttttattatttacttgggaaaggtctagtgattctggccagtttcagggactttctgaagctattttcagttgtttacctttctgcttaaggagatccttttatgatggaatatttcaagcctggagtgtgtgtgggagggtgttatacaacactgggatgataatcactttcctgatgatcatttctctcaaggcaatgatatcagaccatcgatcgcttaccattttcataagggatggggtacacattagttttaccattctccagttatttagtgatagactcactcaatgacacaaaaaaactcagcagtaagtaactacttattgttctcatatccactatgtagccatttgttttaagtagaaaggaagcagaagagagccagaaggaagtagtttctgctggaaaaattggattttgaaggaaaaatccaatgagatttgacagctcaaacagtaattacatcaagggctgactgataacagtttttgaggctatgactatggtgggtaaaaatgaccaggatgggtggggatttgttggtgcttgaacaggaaaaatatttctgaaggagggaactgtattgtagaatattagtgtaagatgtgttacattcatttatgctgtggaatatttgtttaataatgcaaaaatgtgttgcattcttttatgttgcatttgtttaactctttaagctgtgttaccttgcccaaaatacctgattggtctaataaagagccgaatggctagtatctaggcaggagagagaaagaagcagggctagcatgtagagagaataaagagaagaggatggaggagaaaaaaaggagtagggaggatgctagggtccagtcacccagtcacatagccagccgtggagtgagaaggaaagaaagatgaatagcataaagaaaggtagatgggacagagagggaactggaattgatacataaaatgaaattgtttctaatttaaatttaaaaagaaaaagaaagctaaatgaccagaggcaaatgtagttaaagagaaacagaataatttgggtggcagcccccaaagagtataaaaacaacaacaacaacaacaacaacaacaacaacaaaaccccaaaagcccaactacagaactgtaaagacataagatccagaaatccttcccacgaaactttttattgtattgtttgaaagagttacataggccagaaagacagacgtcacaaccaaaattcatcttcaatttaactgaaggtttgtcttcacttttgcaaagataataacccaaaagggatctttgggtccctcagagacatttgctggtcacatctattctggaatgcagtctgtgctgtctgtgagacattagtctggatattatgtgataggtgattatgtgattaggtggaataactactgcgtactccagagtatatgctcaaagtcctggcagctggtgactgcaagggtaccagaacttatggcagacaaagatgcaatgatgatgatgttagaaggatgcatctcattatcttttccaacatttttgtcctttgagccatgttggaagtgtttagtcctgttgaatttcctctgaaaagtgcaccagtagctgatattgacttgggtactattatttcatacgagattgcaatgttcaaccatttctcaattccagatgttccttagaaagcagtgcagttatctctggctagtagttaactcctcaaggccttgtgtaaggggattggtgatttccatataactcatttatcttcaacaaaacccatgagatgtgtttttacttctgtggatagataaggagatggatgcacccagtgattaaattaagccaagatcataaaacagctaatactagagttgactagacacaggaagtttggttccacagcaggccatccaaatatgaactctcatgtatatcagtgtcatttgttaacttgcaaagagaaccttaattctctgtgtttgatttaattgataataaaatttggataatatttattgagactcccctctttgtggtattgagagatatcaatcacaaaattattgaaacaaattaaaggttgaacattggtattcaaacacccaatggggtaagagccatacttcgtggcatactttatttattactatatgttctgagccaccgtgagtccaaggagtctcactgtgctactcctcaaaatgtattcaaatatatttcaaaaaacagctttgttttctgcaggtctggaatgatagcaggcttcttggtaagagagttcctctgtttttttttttaaccaggccctttgtgttttacaatacaaggattgagagtttgtatgaaaatccaaaacactgtgatataaaagtcataggtaaaagtcacagtatatgaagactggataaagaaagaaaaccctgaacagcataataccaaactttgtaataaaatacactcttttaaatatagtacaaagtacagttacatacagttaaccactgaagacatatggacttgcaattgcatttaacagcacagatctaggagggattgtcttcatgccttagtaagacagagctaatttataataggcatggaggatgaacaacacctagttgatactctgaagcagttcatgatcagggagacagttgtgtatgccattgggtataagattaacatagagtaagtgacccgaagaagttgatggaccaggcaggagaccactgggatgtacttcagaaaacaccccagctaaaggacaagtaggaattgacagatatgacacaaagagggacatatgaggcagagggctaaattacctagtcattggtctgcctccaacaactttagtaggccttgtgaaggcatcagccttgtttcatgatccagatgaacctaacaaatggatgagttaggttcagggatgatttaattgatggtggagctctgtgccttggggtaatagagtacaaggctgggtaggtccagctaggcaggaccttcaccacttttctaagagtgtggacactgtcttctttgtaacaagagtcattgatgagttttaacaagaagaaaggtataaataccatattttgagaaggctcacttaacaaattatgtggacatttactttgtctttttggactttgtattttggtatttttctcaggtctgggatcatgaaacaaggctgatgccttcacaaggcctactaaagttgttggaggcagaccaatgactacgtaattatgtaacctgaatggggatatgtagggtatcaagcatattagaatatatggcaatcttgggagacaaaatacttttccttaaagtagctcctctttttttaaatatttatttatttatttatccattacatatacagtattctgcctgcatgtatccctgcaggccagaagagggcacaagatctgattataaatggttatgagccatcatgtggttgctgggaattgaactcaggacctctggaagagcagccagtgctcttaacctctgagccatctctccagccccaaagtagctcctcttaaactaagaaaaagggttgctttctatggaagagaggagagctgtaagaaggttaatttgcataatcctttattaatttgagttttgagttatgtgctttgtagccactgggttggttctggtcttcatgcccctgtgcagttcccttgtcttgagtgtgtgtcaagactgattatccagttctaataatagaacacagcaaacatgaccaactgtcacatctgagattgttagaaaaccacattgtctttggggcatgtttttcttcctgtccagtgctctctctccttttctctttctctctctttccctccctccctgtccccatcttgttgttctatatgtcagttgctatgttgaaagctttcctatggagaggacagcatggcaaggaacagagggattgttatcatacggcacaaggaggacctcggtggattccatggcgggtgaggaacaaacatgccaggcagacagagaagcgagaagttttattggggaaaaggaagggagtgaagggggcagaagagagggagaaagacacacagagacagagagaaagaaagaaagaaagaaagaaagaaagaaagaaagaaaaaagaggaaggaaggaaggaagaaaaagaaagaaaggaaaagtcctgtctgccccttcagaagaacaaggtggggtgggaagtgggtggagtcttcctcttaaagggtcccttgcaccttcatacagatagtgacaaagcagccataggactcaggggctggccagggtactgcctgagtgcattctgttaagtgacaggagtcaggccagcataatgcctgaatcctaacagggacatctccagctgtgaccagcaagggacctgtttccctacctcaatagcaccagagaaactaaacctgacaacagccatgagtgactttgaaagcagatccttcctcactgaagtttgaggtgagatcccagcttctggctttggcttggtgattgtaatcttataggagacctcgagactgaggcaaccagctaagctacatacacctcccactagataacacatgcttgtgtttcaatctctctctctctctctctctctctctctctctctctctccctctctctctctgtttacttgaggcatgaatgactgggctgggagtgagaatgtaaaagctctccctcttcaagtttgtggcttgcttcatttgttgttactccactccacacccttcagacactgcctcaagcagtcccagtctgggccctggtcatcaacatgaggtaagagtctgtcctttctagtgggacataagctggtacagagggaggagagaggagatcctccaagtcacagaattctgtcttggtttgctgggaaaggtgaaatgaataactgagacacaaatacttgagttactggggaaacagctgcatatagacttagtatggggagaaggaagtatctttgagggggcataaaaataacaacacatcagaacccaagaagctccattgatctcagatcagtcctcctgccatggatgttgcgtctcagatcctttgtcctctagtcatttgtatttcttcagctttgtgtacatgactagcagacaaaattctgatttctgcctgtcctggaagaacaaattccacgaattttaaagagcaaggaagagaatatgggaagatttggaggaattaaaggtaagggaaaaatgatttatattataatctcaaaatgaaaacaagaagaaaaagtgttaaggcagatcatacagccatttctagtgtagccacagatcaaccaaagataattttgttttctgtatcaacacatcttgtcaaaccaggtgtggtggtgcacacctttaatcctagcactcaggaggctgaggcagattgttgctcaaaagaaaaaaagaaagcatcgagttgtatgcaaatttactaacttgcaaatattttataggattgtttgatataagagacccatgaataaaaaacaatgaataacgtagggatgtgagagcaagccctaacctgaggccagaaataaactgctctatcccagtcattggagacttcctccagtctcagacctgtgtaataattcacatataattcacctgtgatggctaaagaaactaaatttggtaccaggaattccttaagggactttgactttggccctggaacgtcctagtggcctacaggtgagatttggtggcccccacctttaatctcagcacttgggaggcagaggcaggtggatctctgtgagttcaaggccagccatgtctacaaagtgagtcccagtacggccagggctgttatacagagaaaccctgtctcagaaaaaaaaaaattaaccacttatgtttgcttctgtaaacttgcttatcactgtaggactaggatgaagtggtctttctattcctatataatgggaaagagaaacaacagagggaaataaaacaattttcttgtccggccatggattccatggataattggaatgcacacctttgaaaccaaccttataaataagcccttcctttagctcccttcagcacgttgactctaaggctgcagtcctgcttggcagtaagaatacattcatttaatgtaaatttgaattgagtgtaagtctttggtctttcccagcagatttgaaagccacaacaaatgatattctttaaaatttttttcttattatttaaaattatgtgtatgtgtgtatacctgcgtgtgggaatttgcatgtgagtgtaggtggcccccagaggccagagggctcagatctcctggaggtggagttacagacaatcttaaactgcctgatggatataggctctttgctctgggaaccagactggggtcctctgcaaagcagggcatgttcttaactactgagccatctcccaggccccatatgtgatatccttgactttggtaagtttgagaattattagttgttatcagtcttcttctctgaaaggagaaaaagaaaagtatgcaatgttagattgtgtcccatgttacattgagaaatgaagaaaaagagacttcctgttggagtagtttagatcaagaacaacccaaattagggttctcctcgtctctttctgtggtttgtgctctgtggcctctctattgtgtatctatccccgatgcctatctgtaacaaagggctttgttctgggtttatagagcaacacagaaagcatggtatggtaaggggatgaagagtgctttttaaaaaataaaaaaataaaaaaaggttctccctgcctccaagacagggtttctctttttttctttcctttttaaatttatctattttttacacactagtcccagttccccctccctcccctcctcccaatccctcacattctcctcatcccatctgctcatcagagagggtaaggcctccaatggggagtcaatgaagtctgtcccatcattacattgaggctggaccaaggccctcccctctgtgtctaggtatctctgagcaaggtatctctccataggaaatgggctccacaaagccagttcacatattagggatagatcctggtcccactgccagtggccccacaaactgcccatgccacccactgctaccctccttcagagggcctagttcagtcctgtgtaggttccctagctgttagtccagaatcagtgagctcccactagcttgagtcagccatttctgtgggtttcctcatcatggtcttgatccctttgctcttattatggctcctccttctcttcagctggactccaggagctccgcccagtgcttagctgtagatctctgcacctgctttcatctacttctggatgaaggttctatgatgactattatggcagtcatcaatctgattataggggaaggccagttcaggcagagacagggtttctgtgtgtaacagttctggctgtcctgtcactttgtagaccaggtttggcttcaaatttacagagatcttcctacctctgcctcccgagtactgggattaaaggcatgcgccaccaccgcctggaatggtgatttttttttaaaggcaggctttaaaacataaacaggctgggtacacagtaggataacaatttaggtacatagtttttaaatgtcttcagggaatattattagcttgcaaggtctggcaaaagttcagtctctttgaagacaaaagatattttcagaaaaaggtatcatcacattagatgacaagacttggtggtaaagtctgtcctcaggacttctagttatatgtcctattgcctgatagtaacatgtccttcatggaaaaaaaaagtcctgtgagggaaatatcaagtctattaacaacttagataatggcaaagaacaagaaaataatggtggaagttgaagttacaagcaggaaatttttcattctatagtaagaagctttttttctcatttatagcttttattatgttgaggcatgttccatttattcctactttctctaggacttttttatatttaacatgatttctttattgagtctttggggatttcacaccatgcatcccaattcagctcatctaccagtgcttccctatccttcccccaagaggctccccaaacaaaaatgaaaaaaatcaaaacaaaacaagaaaacaaacaaaacaaaacaaaacaaaacaacaaactcctccgcgtgctcttcctctctaacaaacacctcttcattcaccccggtggcaatgggcgccgcagtgtgtcacacagtgcaccctgttgttccatcgcctttccttgcagatgttcattgcaatgagactctcactggttggttcaaggcctctggtttctcctacactatcatcactggatctgcactgaaacttctctcctatatgccctggcagctcccagtcatggggatccttcaggtattgttcaggtcctgggaagggaagatgttagggtgggccaaccccaggctgggctgtgggcctgggtggtggttgagctggtcggtccaggtcactggggccacccctttattaatggaaaaattgaatacagttgttagtgtttaagtgcgagaagtggttaaaagtgtttggaaaactggaaaggtaagaatggcccaaaccacaaaccaagagtaacaacaaaatgccccacaaagcaagattattaaatattctgtggcacgtatcatatagtcttactgaatgcatctttctggttatccatcctccctgcaggaaatacacctcaccttccatctccctagtttggtaccaggtaacttattcatgcctgctgctcatatgtgtatctgctactttgaatatcttctggacaaatttaatttctgatttatttcttccttaattaaagagttaaatacaacttgtgatgggtgttcattttataattgtatgagagctatggtttctcctttctttgtcttctttccgttttttgagacaggatttctctgtgtactcctgtctgcctggaactcactctgtagaccaggttagcctctgcctcccagcctgggatgaaaggcgtgtgccaccacacctggtatcacctatcttttataggaagggaatgctatttaatagttctgccacaaagattaattttatcatttgaagccaatgaaactcagggattttgtagttttggtctttgctctttttttttttattaccttttttttactttctttttgtatgccttatttttctgctatctctttgccgggctggctgatggctgcctgacttctggccctggcaatgtccctctctttctctttgttctcttctccttcttctttctcattgacacttgatttctcctcctacttgttctctctgccctccagccccacctaccctttctctgcttagctattggttactcagctctttattagactaatcaggcaccttaggcaggcaaggtgaaacaaatgcaatacctttacataattaaatgcagcataaatcaaagtaacacacctttatacacttaaagtaatattctgcagcataagcaaatgtaactcatctgttcatagttaaaataatatcccacaatgtgtgcatatgtgtatgtatatgtagacttgccttctatgcccattgtattttgcagttgaacttaataagttgtaatagtggggtgaatcagtggtgggggagtatagagagaacgtcctgggagaaaatgatgtgttggtcactatcatttatgcattccttggagtctggtctagaagataggccagaatgagataggtattaaaagcagcttttctaaaaaccactggctcctcactttgggtccatggggtgactgaagcaggatggaagccaggatctctgccttcactttgtgtctgcctcctttacttttactgaaggtacggagatattattgttagcctttcctcttgagtcacagaggatttccagagcagtagaacagcacagcacagcacagcataacacaccaccggggcaggggtcattttcctagaagggaggcctcctccatctagagcagaaaagtgatcatgttgtagaaactagattggtctcctcaagcttaaaagacccaaatatcttgtagacccagaaagagacaatgatcaatcagaccacaccttgaaaagacatgtaaacctaataccagcaaggactccccagtggggccacacaggatgaataccttctgtgtttttccctattgtttatcccttccattggtgtattgagcttggcttgtagatattgcctgagaccaagctccctctctacaaactcccataataagaaagtgactcactataggatagaactcctgccaaggagtgagtagatctttccttccaagactataaaaatatgactctattcttagcctctatatgatcaaaagcacattaaatcaagaaattgtaaaatgataagggaataggaaaaatagggagatcaataggacacacagagcaatacacacacacagagggggggagagagacagagagacagagagagacaaagagaaagagagagagagagagagagagagagagagagagagagagagagagagagagagagatcattaagagaagaaaaatggggaacctaaaaatagaagggttgaaatatatctgtatattgtgtggctggaattggtgaggtaccactaaattatgccttctgtttctgtcactgagccaatgatgccaatgattaaaacatagccaaatctagtagcaagcaattaaaccagtttacaagatcatatccccaaacaattcctatttgtgttcaaagacctactggggctggtccagtggaaagccaagtcagcctcttggggcttggtggagtcaaagtgggcagggaattctccagaaatgagatgaagagtgagaacagagaaacagcccagagttccagctccacaaatcccaagtcccgtgttcttccctggtgaaggggcagtggggaagagctggtgtatggaagtgtgtgccatccttagaggaaagggaagtctcagaggttctgctccgtggttgccaagccattagaaggaccacagcttgagtttcagtcagccttgggttgaggatgtggtgccaggcagaagaaaggaaggaggcagaggagacctgtgtgagctgctgtgtgttctagaccctggggctgggacaatgaatgctcctgaccttggcatctcctaagaggggctttctggtgttgaatcacagataagctggagtgtagtttaatcttctgtagctaacgaggaatcaccattttaggtacaaattatgaccaccacaatccagtctgtagagaaaacattccccttgcaaagtaccagagaagagatccatttccctagaaatgtcagtttgaagtgtgcctggtggtagtcagaaatctaccctcccttgaggaatgaatgctttgtcgcacagccagaaagtatactgcagtctacacagtgtctacattatgtagtcaaagttgaatttctggaaaaggagaggctttggctgatggttttggaggctgtactggcactttaaagtgatgcatcggaggctgatacatttctaaagagatgtgagaagacacccagagtctaccaacccagccttcaagtggtagggaattgtgcagtcacaaaggtagctgggaattcagaagaagagtgccattacctatagcagaagatcacagtatttcacttttattgtttggcaaagccaccagaagaggaatgaatggaagagtggagagtggagaggtttctcagttattcatcagtgccttggataaagtcacaacaggcaagagtaagtttctgtttatatgtttattatattttggatactcttaaaaataaaataactcacaaaataaaatgcataggataaaagtaaaatatggaaatagaaatatcaatttaatttcattttggggcaaaacattttcaataaccaagtatcaagcttagtttgggtttcctagtagctacaacaaaaaggaaaacatagtattcatggtcaagttggattacatatgtatctttgtctactcagagaaatgtgtgtgcaactccaggagtgtggtgcacaccggaataccagcacttgagaggcaaggtgtgagaatcatgagttcaagaccagcagtggctatgtagtcaatatatgcctcaaaacaaacctgtatgtgatggctcatgtctgtaatagcaccacttgtgaggcaataaattcttcatgaggttgaggccagcctggcctacatgtgtagtttcagtcattctgggatatatgttatagagtaagaccctgactcaaaaaaaaaaaaaacacaaaataccccccagacaaacaaacacaaattttaaacacaattcacaacaaaaaccagctaagaagaaaactataagaaaggaaaagggacaaaagggtgtgtggtgtgtgtcaatgggaccctggtgctcttgcttctagtaaatggtgtttatttatagacatgaaactcactgagggtttgagtcctggtcagagtctacacttgatccttttcctctttactcttctgattttcgaaattacttgaaatatgttggatagaggagcctgagtgagggattgtcaccagtggggagaacttggctatatattgagtcaaaaattggaagtttccccaggatttcaaaagtctggaatggtgagttaaactttatggggctctttttttgttttgttttgtttttcgagacagggtttgtctgtgtctttggaggctgtcctgggactagttcttgtagaccaggctggtctccaactcacagagatccgcctgcctctgcctcccaagtgttaggattaaagcatgcgccaccaccgcctagcttcatgggattcttttaaatattagtttttctttatttttgagaatttcagacatgtatacaatataatagggtcatggctacccccaaatcctctttgatatggaccccctaaacttcatgttctctttttaaaatataacccagtgaatccatttagtgcagctcatatgcatgggtgttgggacatccaccacaccatgagaaatctaccagtggtcatacattaaataatacaaaaacaaaaaaccaaaaaaacaaataaaacctaaaactcccccagaagctatcaattgccagtacttcaataggggataggttgtgtctggttggtggtgacacacatctttcatcccagcactcaggaagcaaaggcaggagggtccctgagttcaaggccacagtggtctacagtgagttccaggacagccaggactacacagagaaaccctgtcttgaaacaaacaaacaaaccacacacacacacacacacacacacacacacacacacacacacacacacacagagagagagagagagagagagagagagagagagagagagagagagagagagagagagagagagagagagagagagagagagagagacagagacagagacagacagagacagagagggagagggagagagagaggttgtagagggcatcttccacatctgtgctaggttggattgatcttgtgcaggtagccatagctgctgtgaggtcagaagctgtgcaaagtccacaagttcacatttcacagcactcctgggttaattgtttttattacattggtgtgtgtgtgtgtgtgtgtgtgtgtgtgtgtgtgtgtgtgtatgtgtgtgtgtgtatgttcatgtgttgtgtcatgagtatggagatgtggagacagaggacaatttgggggattcagttttctcctaccatatgggtcctgagaatcaaatttaggttccagtcctggtggctacacagtcatctcaccagccctgccttctgtagtgtgaagtgttgacagaactgtaaaactctactacagaattgcagaaagggagtcctgcagtagtatttcagtgctaaagtgaagattgtctttttcattggccctaaaaaaatctcttacgcctgtctctgcttctcctctctctctctctctctgtttctctgtctctctcctctctctgtctctctcccttctctctctctctctctctctctctctctctctctctctctctgtacacacatgtgtagtgtgtgcatgtgggtgtgtatttgctgcatgcacatgagtcctggtgtactggtgtactggtgtaggtgcccttatgtgtgtatgctaaggccagagcagcacattgggcattttcctctattactgcctccttattgccttgagataggacctctcacttcattgaaaacttgctgttttggttagacagtcttgccacgctctcaagcttgcaaagcaagcccctttatgcattgagccatcttcccagtcttgctctataaatctcacttagtacatcttctatgtattggtcattgtatggttttagactgtcaggcactagtttaggctctaagcatcactgagtgtcaagcaacgtcattaatgctgttagggagctgttagaggtgtggctgtaaacaaatgaacaagaagtaaacatgtcactaaagggggaaagagaactgttagatacagctgttatctttatggtcactgaccattctcttcatgtttaatcatggagaccagatgccaggtgggaaggaaagtctgctagttattctcagtgccctgcacacagagaagatggcgagtgtgtaccacagttctgctcacagctgaggaatttcaatatctggaaactcccagacaaaacctacccatctatgtgttctcttgtattcctttttctaaaagttattttaagtatttatacaagtacatattgtatgttgaacatttgttacccccactttctaatgtccccttcctcgtgtctttccctcccaacaattgtctttgtttccctaaacagttttgcttctactttcctgtcccatatactcataattttttctcttttttcaatcagttttaaaaatttattttacataccaaccagtttcccctccatcctttcctcccactcccccccctgcattctcctagctccccctcatccactcctcctccatcaccacttagatggggtaaggcctctcatgggaatcagcaaagcatggcacatcaaactgaggcaggaccaagctccctgcatcaaggctgaacacggcatcccaccatagggaatgggttccaaagagccagatcacaaatcaggaacagatcctgcccacaggggccccacaaaagaccaagctacccaattgtccctcagatgcaagggcctaaattcctcccataccggctcactgttaaactgtctgtccagagtccatgagatcccataaactcaggtctaatgtcagtgcgtgcgtttccccatcacgatcctcccaccccaacccctgcttatacaatccttctaccctctcttcaactggactcccagagttcagcctagtgcttggctgtggatctcttcatctgcttccatcagttactagatgaaggcttcatgctgacaactagggcagttacaaatctgattacaagggtagggcagtccagggaccctctccaccgttgctggtagtcttagctggggtcatgttgtgggttccagggagcctaactggcaccaggtttctccctaaccctacaatgcccccgtctatcaagatacctcccacatcactctcgtgctcttcctagggccatttgattgcaaagcctttccacaaccctttattctgaggaactctttgtctttgaggtcgaggtgcgtttttttgtattcagcagaaggatggatcctgtttttgtatatattctgttagcctgtgtctttttattgatgaattgagtccattgatactaagaggtgttattgacttgtgattgttaattccagttattattttggttttggtggtggtgatggcagtgtgtgtgtgtttctcttctttgggttttctggcgtgagattatcttttgtctgtgttttcatggatgtaactgattccttgggttgtagttttccttctagtactttctataatgttggatttatggataggcattgtttacatctggtttcatcatgaaataccttgctttctcagtctatgttgactgaaagttttgctgggtatagtagtctgggctggcatccatggtcccttagtgtctgtagaatatctgcccatgaccttctggcttttagagtttccgtggacaagtcggtgtaattctaataggtctgcatttatatgttacttggcttttttcctttgcagctcttaaaattctttattctctaatttaatgttttgattattgtgcggcaagggtactttttttttgttttgttttgtccagcctatttggtgttctgtaagtttcttatatcttgataggcatgtctttgtttaggttgggaaagttttcttctatgattttgttgaatatattttctgtgactttcagctaggattattctccttctatccctattcttcttttttttttcccttggcaatcacttttttttctctctttttattattattaattcaagttagggaacaggcttgtttcacatgtaattcccctctccctctccctcctcttaccccattccttctcccccacctccaacctacctcccaccccatccacccaccactccccaggcagtgtagggcccccaaccggggctccaccaagtccaccaaatcttcctgtgctgggcctaggtccctccccatatgttcagagacagagtgcatcccttcaagtgtatccctattcttcttaggtttggtcttttcatggtctcccagattttctggatattttgtgttaggaatttattggatttaacattttcattgaccaatgaatctatttcctctatcatatcttcaacacctgagattctgtcttccatctcttgcattctgttggtgatgcttgcatctgtggttactgttcacttctccagattttctgtttcccgaattcccttggtttgtgttttctttactgcttctctccttgaggaaggagtaacaagttaaggaaacagccactggagctcagccacaccttgtactatggagggtatgacactcaatcagagttgtggtgactgaaccacaggattggggagagagatggtctgtgggagatgaacactctgcatcttattacatagctcttcattctccagctagcacctgcctttggtcaaacccaattagaagccagagggtgatggtcccagctgatgcagtccttggagactagccttccacaggacatgggagggtggaagagagatctggggggcaagttgagtgagtcttgagcaggaagagtaggctttcaagtgttgaaaatggagtgtccagagagatgggaggatataatggtaccactgagaccagaagccaggaatttccaagaaaggaatggatttgattgcaacatagacggactcaaaactacttatttgatccagaaattggaaggtccttggcaaccttcattaagatggtctcaaagagtagagggattaaatataaccagattgcttgtctgcttgtaataaagaacagataatggccattgtggcaaagagataagagagcgtttttgagagtttttgtttgttactcctccttttctcctccttctccttcccttgtttatttttttttcactttggagacctaatctcataatctgatatagcccaggttggcctcagaccctaccatgtggctaagaatgaccttgaattcctctttcttctgcctccacttcctaagcagtgggattgttctaccaaacccagcatgacatcttgaagggtaacactgctggtaactgcagagatagagttgctgtagaatggcgaacagtggtgtagatattggattgatcaaaaactttgggggtaggaaattcccagaggaaacaggaaggtctgagaagttagtttggcagtagataaagaatccatataccaagaaatatggtaatgtgtgatgtcctcaaaggtcagcagagaatgttatgtctaaaactgatgagaatgatattaagtgtcttccgggtagcttgttaggacattggaggctagatcatcagttatagtggcttgaatgataaaagccccacaggctcataggttcatatgtttgaatacttatccccagctggtggatctgtttgggaagacttaggaggcatgtctttgttaaaggaggtgtgtccccaggggtgtgtttgaagtttcaaacacatttacacaccatttccaattctctctctcccctttctctctctgcttcatgctttggtgtcacatggaaatgctcagctaccagctactgctccagcaccattcctgcctgtctgctgccatgctcccttttgtgatgaccgtggattcaccctctgaaactgtaagctagtccccaataaacctctttttttcctgtaagttgccttggtcacggtgccttatcatagcaataaaaaaataaccaagatattagtgaaggaggtggaatggaacatttgaagacacctgggaattctgaattagccttggagaggagttgacccagaagatggtactattggagttgataataccactcaatgtctgttatccccatccataggttgttgtgatcttgtcctgtctaatctgtattagagatgttgttggatgtcagagaaggtaacaagattacagaaagtcaaagagcttaggtattgtattagcttgcatattggcagaagattaagaagagctatgcctgatgtctttctcgattggataggaccaggaggaactcataggagacttttgggggaagatggaggcatcaaggaggtcttgaagtgacagaagaaaatcagagatagaaaaaaacattttgtttttaggttttatttttgttttttttatgtatatgttttgtctgcatgtatgtctgtgtaccacatttgtatagtgcccacagaggccagaagagggtgtcggatcctctgcaaccagagttattggctaccatgttactacctaccacatgtggttttgaacccaggttttctggaagaacagtcggtattcttaacaacctaaccattgattcaacctctagaacaacataggtttcacagactattgctaatattcatagagatcttactagggcccaggcagatgtatcctcctaatgtttctaagagtagagtctaactgttcttttcatggatgaagaaattaaagcagaaagcttccacagattgcctaaagttccattgttggtttgtgcatcctaacactatcacctatacaatttaactccagagacactcttggctactatgaaaaggatcacgaaagtggaagggtttgtgatttgagagtggtatactctggtttaagatttctctgctgacttggcttgaaaagttattggtatgctgaatattccaacattattcttaattgccacagaagggagaaattgtgctttgttgatgaactgatgagtggataaaaacaaccatgtaacatatatatacaatagaatgttattcagtcatgaaagtaatgtaattgaaaaatctgggacaagttgcatgtatagaaggtgttatgatcatattcattattattatcatctcttacatcctttttagcttttctcctacctcatccatctctgtctctcattctttgtctctctgtgtgcaatgagtttaatgagagtcacttttacaaacatgggtagggactatttgctggagcattggcaaattcctggtggcactgaacaaaatgactccagctcctctggcaacatgtctatagctcttactggaggagtgacctcacaccctccttcccatttatgatgggatgctaaatgactttatcttgtgcaggtagccacagctgctgtgagtttgcggtgcaacaacagccatgttacatccagaagacagcttttcatagcacacctccctatcttctggctcttaaaatcctcgtgcccccttttctgcaatgctccttggacctctaaagtggtcagatagatgttttgtttagggctaggcactccacagtcatctgttataagcagtctctgcattagctgtttgccctctgcaaaggaaaaaatttttgagcaaggctgagaacttcaatgaatagaagtataaatttttttataatgtaattttgctatatgcccatttaggaaaacatcagtagtaaactatacctcccacccacctaaaaagtttgtgacaatcccaaccacaggcttttgactttctggaactatgaactttagccagcagggagaaagcttcctgtgaagttctggcttgatctctctgtttcttgcaaccagagtgtgtgccgtgtctttagccatagagtttcaccgatatctttctggtaggcagctaagaccagtattgttctgagagcctctgggcctccctaaccaacacttcatagggagggatccctcacctgatgctgtgattttcattttaatgcctatagcttctgcaagcatcgttaactggccataaaaggcacctcagttcaaactttaaaaaatgcattttgatagcccttgaaaggttatatttaataaattgaataatttcatgtgtattaaggtacctagaataggcaagttcacagagacagagtgaaaagcagaggtcactaggactgtagaggaccttgtagggttattgtatagtcagcttagacttttgggaggacaggatagaggtagagttataaagtgagaatgtagttaacgccctattccaacaaaagctttcagtggttagctgttactctttgattagaacagtcacaggagtgagctgctgaatgtaggctcagtgttagaaaaaacaaaaacagttggatctgaagtgacaagggtgggtgagggtgggagtctagcacatcactcagcaggaacatcatcaggtcctaacatctgtctatcctcaggggcgtcacctgtgccagtagcagacccaatgcactaagtacatggaagaagggaatcagactgggatggttctcttccacttccgccccttctcccgactccccgaggtgcagatgctgatctttgtggtctttctcatcatgtacctggtcagcatcggaggaaacatgtccatcgtcctcaccatctggatcaatcgctgtctccacacccctatgtacttcttcctggcgaacctggctagcctggagatcttctattcttctaccatagctcccctgactctggccagcgtcctgtccacagagagaactgtggtctccctggcaggctgtggtgcccagatgttcttcttcatcttcctgggcagtgctgactgtattctgctggcaatcatggcctatgaccggtttgtggccatctgttaccctctgcgctacaccctcatcatgagctggcacttgtgtgtccagctggccctaggctcactgtttctgggtttcatcttggccatgcagttgactgtgctcatcttccgtctgcctttctgtagcagtaaggaaatcagcctgttctactgcgatgtcctccctgtcatgaggctggcctgtgcagacacccatgtccacgaggccactctgtttgtggtcagtgtcatcgtcctcaccatccctttcctcctcatcactctgtcctatgtcttcatcgtggatgccatcctgaagatccgctcagctgaggggaggcacaaagccttctccacctgctcctcccacgtgactgtggtcctcctgcagtatggctgcacgagtctcatctacttgtgtcccagctccagttattctcctgagcggggtcaagtagtttctgtggtttacacattcatcacccctatgctgaaccccttgatctatagcatgcggaacagagaactcaaggatgctttgaggaaggcggtcaggaggttcctcctgcttgaaaaacaatgagcactctgaatgaccttctctgaccctgagaagtagagtagaggtgctgagtcgacagttgatgagatggggaggtggggtttgcagggtatggggttgagagactttaaaaaatattacctgtgtgagtgttttttgcctccagatacctgtacaccacattgtgcagtgcctgtagaggccagaagagggcgatgcatcccctgcaactggagttacaggaggttgagagtcatgtggatgctgggaattgaatctaggtccttccgtcagtgatctttcccgctgagccatctccgcccgaaagcaattatgtattaacaggactccttggttcttgcttcaaaatgaatccttcctccttccttactgctacacttctgcccagacttcagaagtctacacttcaataagagtgtttcattgtaatcccttttactggagagattaaaacaggagaatggcaagttcaaagcttgcctgggcaatttagggagcgtttgtctgaaagttagaagaaaacaaaaggactggtgctagagggagctcagtggtagaatgttttccaggtgtatgccaggcaggaggttcaaccccagccatagggtttacgaccgccagggggcgtgaaagccctcgcagtccgcatggggcacagcggcagaaggacgcgagaaaagggattagagttgagaactgcagggctggcccacacagcccaagccctgccttacttgacggtctttatggcagcggaggaaatcagtaggagagtgcacatcgcagagggcaaagttcggttagaactgacgtatctacgacctttaaaactgaacgcaaagagcaagatccttcccagtcttcgctggctccaattgttgaccaccaccccgcttgatatgcccaaaatcagacagggaggagacgggggtaggggcacggttgaagagggaaggatggtgagaggaaccacacttctctaaaaaagttcttcaaatccggagcctctttacagcaaggggatgggtggagtttaagttttccaaaccaaccctgtcctgcagttacaagtcagttgcttctttctctcacaggcttcgcagcaaactgctaagtggtttctgatttatggctatgggaacagaatcctctaaaggaacaggacttccctaacagttattcaaattgttagtaaaaggtgaccgaaccgcctacacgtctccaagaggccctgtggccaccaacagcataactcccccaaattcctcgccgcagcccaacccactgcgtctcatctccaggtctctgagcccggactttgcagttctgtacctcgcagctcctttctttgaggcagagtatctcttgagcatcatcggaacatttccccccatcaaagggagcaggagccagcttgtctttaaccggactagtccgcgaagggttggacaacatgggcagtacagagaatacggaatcgaagccggacagatcccttctccttttctctgcccggcgggcggggccgggaaccccgaatgcttctgcttccgtggatgctatgacacaccgggccggtgacgttggatcgcgcgcgggccctttaagcaggagcgcggggcgcggcccaggtacggggcgggtccaggggcgggcgggcgcagagccggcgctggtctgggagccggatttggagcgcggcgccggcgggggccggagggggcggcgcggcggacctcggtggcctcggacgctcctcctcgtgagcggccgccgcccgcctccgcctgcgctagcagctccctcgccccggccggcacccgctgccgctcacctgggacgcgctcacctgggacgcggtgcccgccgctcgcacctgggccaggatgaaggaccggctggagcagctgaaggccgtgagtttgctgcgcctggggatctggagcgcctgggggctgcggagatccgccgccaggaggagcggcgcgggaggggggcttcccttagcccctcatccaggccgcaggggtgctctgcgagctaggcctcactccttaagcccccgcctcatcccgcggagctctgtaccctcccctctcctgcagggtcatgtgctcggtgattcatcacctagcagcgatttccctctacgcccgtaaccctctcatccctgctccccttcctcccccctcaagctggacagggttcctccatagctggatccaccccggtaattgaaatcagtggggcttatgttatggtgaagtcaggggactcaacctcaccagctgccttctgccgcctggcactgtgccccaaatcggcctcctctcctcttccttatttccctcctggagcaccgggcagggctacctcatccccggcgtagctgagagttccgggtgacctctggagctgtgagcttgtcaggtgctgggatgggctcccttcctgccatccggtggtctctaatttttttttttccttacatcccctgagacagctgtggtcgtctctgccgcacaacagctaaaaagcttaggtcgcttactcttttcagtctgtttccttgtctgtcaagtgagaatcacctcctataggtctgttaggaagactgaatgacacaatgggacttgatatagggaagtgctgaagtatgaatttttgagatctagattcaattagtaagtcattgagtacattctacgggactgggctagtgtgaaactttggagacccatccagtgatacaggatgccccttaatggaatgtaaagcccagccctggatactcgaagtcctatctacctgccaccctagaagtgcatcagcttaggcccctcccctcaccccctgtcaagacctggtgaaggtctcactgaatctaactaggtgattagtgagctccttagagttgggaagtattagtctgcattagcactggggctttgtcctgcctggccctgctgcttactggttaccctttaaactccaagcttaagttttgtcatttgtaaaatgagtagttgtatcagctaaaagcaagcaagcccacaggggagccctttgtatgatttaggacttaataagtagtaagtgttatgctaatgactgcttttttttcttttgaaaatagaaatgttggagaccagtgggttggtattgtaattgctttactttctcctcccttgctagagtgaggtcttcctgacactggtcatatgctctgggtactgggctgcagtgtaggcttagaagccagagaaggaatgggcagtcacttatgtagtgggagtgagcttctgccccaatttgctcttttatgcttgagcctcggggcatcctggttaactaaagtgcaaaatttacttgtctctgctttataggtggggaaactggagctcactctggtggtgggtgggggtggggagtgaggtgagggggatgctccctgttgaagagttcaaagccgaacagcagtcacaggcagctcccttcctttagttaggagatctgtttctggactcaggtactccctggctcttttcggtagctgggttgtcaacagagcagtcttacgtgagcattgagttccaagaaagaaggcattttccaggggaccggagcaaatccttgtgcctttcagtccttcggggctaaccactgtaaaacagggctaccctggtatgtagtgaaagtgagatgctggatgatgctgttattatggcagtgttctcaaaccacaggcaggctgctgcccttttggagccctgcaatgccaagaagactgggttgaggttcaaagacttctctaattgaggccttggcgcttaatagctgggatccttttgcaacttcacctttgtgtcgctgccacggcttttgcttcttctgggttatctctatttattcattgacagtttcatacacatccacaatgtatcttgatcatatttgacccatatcctccctccactatcatcatgtagcctctaatactaccccctttgcaccttcatgtcttctttttttcttttattttcctctttaacaatcttatataccctcttgtgagatagtatactttaagtgttctcaaaacaaaaatgatgaatatgtgtgatataacatgttaattggtttaatttagccatgccattgtgaacatactgtattatgtatcataattgtgcatgactttatttatgagctaaataaatgaatggaaaaaaaaaacttatataaccactgagtctaataagtatgcatgcaaatgagtatggggccatctacgagaacacgggcaggctaccaggtccagaaggaagaaaaaagattccctctgtcctagaagccatcaactgccaatagctcctcatctagggccggagcctcatgaaccctcgcccatctgtcatggaatgccgactgactagattctagtctgtgggttcatgagtgctacagtcatgtcatgtccagaagatagcatttcatagcagttcttcccatcctggctcagaaactttctgccgcctctttcactgtatcccctgagtctggatgctggtgatacaaatgtccctgctagggctgagcacccagctgccccctccctccccccccacttccagcactgaccagttaggagtctctgtattgactgctgcccactgcaccaagaagcttccctgattacgtttgaaagcagccctgatctatgggcataagcataaacatctagaagacactttgacagcatgaccatttaggaaaggtaccttcacctccaagcttcttgatgctctctttgtagagcaaaaatcacttggtctcagaagatgcttctgcccttattaatgttttctgcgaaggatgttaaggtttctgtgcattatcaaccattctgtggttcttccacccctctttgtcccttatcccaggaaccaactttttttttttttaacaagatagggcacggtctctctctgattcctattatctacaaaaaaacatttgctaacctgcatgcaatacatttcccattgagcagcctgtgcaatgtctttctaaaccccaaggggagagggtgatggctgctatcagatagctggggctgccccatgtgcttgagactagtttagctgtgagccgataggaggggaagatgtggggttgatgagtagaaatcagaaatctttaagaaagtagtttaaaaaattgttattagcagccaggtgtggtgcacgcttttaattccagcacttgggaggcagtgatctcagagatctgagttcgaggccagcctggtctacaaatcaagttccaggacagccagagctgttacacagaaacagctcaggaaaaaaaaaatgtaactagttgttcaaggattgggcagggcagctgaacaggtacagaatcctccagcatgagaggcaagcaggaagattgttgaggtgttgagtgctataggaatttgagcatctcttgagggagggaagaagtgtgagattgaaggcctccaggaaccttgggagtgtctggttccagtgagatgctttttattgtgttaccattctggagtccacaaggtacgagagtcacacctgtcaaggtgatctcagtctttcccccagggtcaccatgcaggtaaaaagagataatctgtgacaatctgtgatggttatctactatagcacatgtgagctgtccatacttagctccctgggagcaatgtcctccctaaaccacggggtctaaggctttagtcacaggacctggcttaccttatctcctgactgctcctcctcaggggctcccatcagcgttttcttgttgatctagaaatttgctgggaatgtgcagtgactgctcttctgctcttctcacccattttctactggctgaactttgaatctgctggacaattcctggcccagaaatcttttgtgtgctcctgtttgtattcagtaaacatttactaagtgcctattgtgtgtcaggccccaaggtagatgctgggatgtagtatggagcaacatttgtttcaggcactcaggaaattcacagctgggtagaaagaacagaggaccagctacaggaagaccctgctgactggcctccgggagatagatgagtctgggggtgctattgtcagcagtagtgttttcaatagaggtcctcttcaaatctaatatagtctctttagatgcaagtagaatttatttggaagaaaatgtggatcctagattttctctccctttggtgagtgcttcatatataacatatcaagaataaaaacatgcatgctaacatcaaaagaggggtatggtgtggtggtgtatgatgtgtgtatgtttccggtacaccctgtccagcataatcagaatttagcttgtatcctgccgcataagaggtttggcagtactattgtacaaagtttttatcttagagggtaggaaaaacaaatgtatttcatggaaagaaacaaagtaaaacctaataaagaaaactgagtagccagtgatgcatagaatcgagctcaagatttgggccccccccccaagacacctataaacaaaactaaaatgacttggatgtgttggaccaggaccattaagggacagtaatgaattagccgctctacagcccaggcttaacctttcatctgcctattttggtctagctgctacctaaaggcctgccatgtctgtccccaccagaagtttggatctctgtgtgagcagaggcccttagggtaatgttgtgctgtaatcctgtcagaagtaaggggctgtgcttctgtcagagagtgactgtatgcctgtccctaccctgtgctttggatcataataaatcttatcataccaacttgccctttgttgacattccgtctttctttagtaatgggatttctccccagtctggatcctgtcatctcctccctataccagggaggattcatttccagggagagctgttttgctgcccctagacaggagcagacacaagagtgatagggattgagtagggattagagacccatcagctggaggccagagagaaaatgcttggatgagagaaggggattaattttatttttattcctatgagctcggggaaggctgggggactggcaggaatttgtccatgctgtcctctctccctcccagtgcctccttcctactgctgatattcccgccctcctccccagattcattatttacaggcaattaattattccctaactgcagctagaatactctctgtccagtccagccacttgtattagctctgtgttgttttgcaaccaagcaagttagtgctttaaaaaaaaaaattaccatggagtaggtttgaaaccactgtccactaacttcattatctccccccctcatcccccaagacagggtctcacaatatagtcctggaactcactgtgtagaccaggctggcctcgaactcagagagatctgtttgctgttgcctttaccttctaattgctaggattaaagttgtgagttgctgcaccagattcactagcacctcaatgaattactctttgtattctatatcttctgtttaaggctggtgactcaaatgcttgtcgtgttaactacagtaagtatcacttattgagcagattattcttgggtaggattttggtttgatgcctggcacaccttctctccagtcctctcagttctacaaggtgaggcggtgatgtttgtcatttctcctttacaggtgagggatgtgaggcttggatttgattgagatccatcctcagctaggaatgagcatgtttgttttgcctcttggaattaccttcccacactgtgtcagaccacctccccctgtgctgtgttgcccctttcccggaagcaataggagctagtgaatggcctctggggccccagtacccagcattctgcatggtagtcgcatgtcacaccttctctgcctgctggcccttactcattattgtgattgacttttcttgctctgctccctgtggttggtgaaacattacctgattggagtagaacatttactcagggaatccataactttgctaatgaagccaaaagtcactggttcatccccaaggtatataaaatgaattaatcccaaggctctttcatttgtcaaaaactccaggatgtcatggaggtggtctttgatcagaaaaacaatgacggacatgtggagacctaagtgaaaacctagctacctcatttttccctggctaaaatccttctcatcctctaaggctaggctcctgtgtcatcaccatgggaaagcttcccaggttaagcacataactgtgccttccctggcccccacaggttctttattttgttgatacaaaacatagccatatggtgttagtattgcagtttcagatgcatccagtcctgttaggtctggaaggaagcagaccacacatacaacacttattttttcccagttgaagcattaaaaagctgaatattaagccattctggaagtgaacagaattatgctgttgatggatttgatacacgtagattttgtagtcccagacagaccttgtctttagtctcctttatgtatggtcccacttctgctttctcccaccactgtctttcctgctaggttaccctgctttgtggcctttggctgtttctatggcaacatttcccagcgtgtgtggagacagagtgaagttcagctcccacctaaagagattagtagagcgtgtactgtctcggtatgccagctgtctgggttagggcagcttggtatgacatgaggtttgcttagttctttaaataatttctttcttttaaaatactttcggctttatcaaagatagtacagagagatccagtttcaccgctgttaacatctcacttttgagtgtacactcatcaaacaaagaaactgacacaagattcctcactaaaaaccaggctgtatctgggtgttttcgttatcccactaaaatcccttttctgttctagaatttaagccaggacaccgcattgcatccacttctcatgttgccttagcttcctctgtcccaacatagtttcttggtccttcctggtttttcatgacttcattggcatgacatctcctttatagtgctttggcaatgcatgtccctggaccagggctgcatgctacagttggagtggcagtgggggtagggaatctcttcaagttggttgagaacaggctcctctggctggggcacacactgttggcagggtaggtagctggcatctttccgctctagttcctggaagatcagtgcagggattaaatgctgtggtaaatataaatgctgtataccttagaagagccttcctctcgagtgtgagtgttcagtcaatgctacctgctgcagctgtgatttgagtattgtagaaggattatagaagaacccgagaaagaggtgaggggacaggctcaaaggaaaaatgcagcagaaaggaaacaaggcattgtcagttcctttctcctgtatccttgagagatatgcaggggccaggactggaggcggaggaaggagagaaagttagggacaggaggctgggtcaggggttgaaagacctaaaggaagctgagctcagaaggaggaagaagaaggtattttgtgagttttctctcctggcttcaaggatgagagcagatgcagggtgtggtgatctcactcagactggtcttgctggaaatttcctctgggtaaatccgctcagttttctcaaatgttgccctgcacacccgtctctgaaactctctgtgtttgggtgaggttgggaaccctgccttctgtctataatttctcatcataattgctgtcccccccatgtggtgttgtaatcatctgtttgtccagctgtctccaagtttagcaggaagagaacttggagagctacagatgctgagtttgccttctgagtctccaacactgggccattacttggcaaacattcgatgttctccttgttggatgaatgaaggaacacataagcctgtagggagaaggagagtcttgggtgtggtggttgctatgaaaccttgagatccttctccaagttaatatagtaatgaagcgtagatcatatcaaagagaagtccagaatgagcattgttcctaattagctgggcgactgaaggcattaaccttcccgactatttatagcggttgcgtctatacatacggtctccttcacctccttcctctcataagactgtttgctattctactctggatctagcttaggtcttgagaatcaaaaccaggtaggcagtaaccacatgtggggatgggatttcagtgtttgtcttaacaagcagcatggaagctagtttgaaacatatagattaagaaatattaaccctatactaagacagaaggaatgttcaattccacaagatatgagtcagtgatagtcttagagtaacaatacagtagtagtctcccagtagaattaaatgaatgatagtaagagtaaatttgtgagagtgtagctggagcacaaatcagagttgtgtgtgtgtgtgtgtgtgtttatcatatagtagaaaaatgaaagtcttacaataagcgaaataaattgattgtataaatttccctcctcttctgtcacctctgagcactggcatgtaatgtgtgccctgtgttgctctaaacatttagtatgtaatagctgatttgatcatcacaagaactttgtgagcagagtattctggtcatgttacatctgaggaaactgaggcagagagaagtaacctgttcaaggtggtagttcatagctgtgaagtaccttgctgggtcttcaccacagaagtcaaatgtaccagtgtgtcaacatactcatgaacagaggtagcaatagacacatagtatctctttcattgagcatataggctcatctagcttggatttgtttatgttgtagcatcctccaaaataagtgatgatttgtcattgaggctgtggagaggcacttacaggcacaacagaaggtacaggcagaggcttccatggctctgctagagtagagtcctaatgataccatttaatggctaaattgctttggatgaattaattaacctaataagcagttaccatatctgtaagtgaggaaagtaatattcatccctcagagggttgatgtatgacttaaataacacatttgaagtcatggaagtgcctgtgacatatatattatatattatctactgtcattgttgtgtacatggagtgagacctcagggactttgactcttgacatctggcttgctggtcttgaactaatgtgataatgactttattcctcaatgtcgcctcctttcaggtagggccactattttgtctacacttgctcagctagaacaagatgttgaaaggaaaagcatgaggtatcattatctgcccatttcctctttattcatatgacaagggtattgcagaagacgaaattcagtgaaaagaggaagtgtgctctcaaggacggttttgctagtgaagaaaattgtccctgggagaactgggcattggcaaagggtcatctgactcttcagtggagcaacagagagcactgggtgtccattgagagcccacatactcacttagaatttctggttccatctttaaatcaaagaagaggcacagggtacctagattgggcatgtgtgtgtacttgtgtaagtggtgtttgtctttgggagtccacagatcctggtcctagaggaggcagccttagaggagtgggcatcagggataagaaaaaggggtgtagttgtccctttgaatcgaatgcatcagaagagaactgtgtgcagagaagcgtctgcagtctgcatctggagtaaaggactatttcaaccaggggagaagataaaacaatctatgttcttctgtgcttgccaggagggctccttcccacaagccacagtcctttactagccctctctggggatttggtgaccagatgtcccctctctattgattcatctctcttcctcccctctagcttctgtctactttagtgcttttctacctccttccccccttcttctctcccaagtcccagtgaaggaaaagctcctgcacactgcagagggagggggagccctggagcccacctgctgggctccccttccttgacctatgctgggtggtttctggggcacatttgaggtaccccaggggttttcctagaccggggtggagagaaaaaccaatgtttaacaaaggcatgcactgtggccaaggactatagctccaatctcctagcagagtactttctgcatgcctggattgctattttgtgtttcaggatgctgctgcaggtagccctgcagtaaaaggacttaggacagtggcctgatgcctaagctgtaggttctgcaaccagtagctctaagaccttgaccaacttaactccagacctccattttcttagctacagcatgcagatgggatttgttgacatgatgtgcaaaaaatagtaggtctgttacggctaccaagtacttattagtggctataggatgcaaatacattcatttattatatgagccaatgaagagccacctgtggtcagacagacaggatggtagagagggcctctgagaaaaaggcaatccacagaattactggttaaattgtttaaggttgcattctgggctcctcaacactccctactctgtgcaggagtcagccttcactgttatctttgacatttggagtgcattttaaggcttaagaagcgggaataaatccttgtgaagcttacggttgctcgagtcgttggtggtatcgttcatctgcccataggagaggcatcaggaggaagtgggtggcagggcttgtggttctcctgcacatttttcccccctgtggctgaattttcagctattgtaacgtcctcattaccacatgccttgattctttgatactgatgttgatgttctcttggttaagctcagtcatgtgaactgaggataaagggcacagtgtgttttccttgctccctccctccggggagggggacctgaggaacctggatttaccacagcctcctgtatcagaaggaaaggagctccatccccttcttgggctactttgtagagaagccagaggatggttctgggtccagtaatgtcaggtgacacatgaccatggccttgtccttgcattttctgatgagggttaaatgttgttgctactttatgtatttagaggctgtacatgggaagaactctgcttgagaagatggacatccagaatccagagtgatcccagtagtgtcaggcacccttaaggttgcatttagctctgaaagtcctgttttaccttaaagacccttagactcacaataagtagtgctcatgtgcagtgctttattcagctcatatgtgtgtgtgtgtgtgtgtnnnnnnnnnnnnnnnnnnnnnnnnnnnnnnnnnnnnnnnnnnnnnnnnnnnnnnnnnnnnnnnnnnnnnnnnnnnnnnnnnnnnnnnnnnnnnnnnnnnnnnnnnnnnnnnnnnnnnnnnnnnnnnnnnnnnnnnnnnnnnnnnnnnnnnnnnnnnnnnnnnnnnnnnnnnnnnnnnnnnnnnnnnnnnnnnnnnnnnnnnnnnnnnnnnnnnnnnnnnnnnnnnnnnnnnnnnnnnnnnnnnnnnnnnnnnnnnnnnnnnnnnnnnnnnnnnnnnnnnnnnnnnnnnnnnnnnnnnnnnnnnnnnnnnnnnnnnnnnnnnnnnnnnnnnnnnnnnnnnnnnnnnnnnnnnnnnnnnnnnnnnnnnnnnnnnnnnnnnnnnnnnnnnnnnnnnnnnnnnnnnnnnnnnnnnnnnnnnnnnnnnnnnnnnnnnnnnnnnnnnnnnnnnnnnnnnnnnnnnnnnnnnnnnnnnnnnnnnnnnnnnnnnnnnnnnnnnnnnnnnnnnnnnnnnnnnnnnnnnnnnnnnnnnnnnnnnnnnnnnnnnnnnnnnnnnncaaatcagtacacacacacacacacacacacacacacacacacacacacacacacacacacacacacacgaactccgtgaaggaccatagtaccagtagaaagcctaggaacaggagtaaacatgacatgtgtaggcgatacaggatcaggttggtggggacagaaagtgcttgctgctgagcagggagtctgtgactctaagacagacataaagggttttaaagagcagatctttgactttgttagtagttgatatatattgggagttggggaggtaattggattggaaaagagatcaagtgcttggggatgccattgcaatggtacagagcctgctactcaagctaagtcctatgacacaatatcttttctgctttatagatgaagaaatggaggctcagaggtgttaagccatgtatttgaggttcagtgactgtctggtgatagggccacattataaccctggtatatgttgccccggcagatctatcttacagatgcagcctttagggaggggaaggggatgatctcttctcctcacagggattgtttttctatgcctacatctctaatgccatggggaaattgacacctgacactgctggtgagggggagctcagtattgtactaaaagatttccatatgtgacttcttcagttctcattcaagtaagacagtgtgtggtgttagtaccaacaatggtttaaaaatattaggcaggtgtggtgcttgagtgaggtctcacagctagaatggcaataggtgttggactcagtttgaaggttacctaggactcttctttccttttcctagttcactctctcactaaaggtggaccaggccatttgtctcaagcctgctcaaagccaagagccattgggcagcccctgtacactatctagtcttagaagctcatgttatgataactactgagtgtctgcttctcatattccagtccacagttgttcccagcttctggaaacttcccttgatccattcacgaagtagcttcttcctatagcctgaataaatatatgtgtcagtttggaccctaaattgacatcatgtgtctgtgtctgtgtctgtgtctgtgtctctgtgtgtatgtgtatcagttacatacttgaggtcccttccctcaatggagctgctaggccacctcttgggaaagaacattcttgaggctgagagatggctcagcagttattatcatatactgttcttacagagggccctggatctattctgagtaccctcatggtggctcacagctgtttctgactccaataccagtagatacaacatgcaagtgttgttcgtgcaagtgttacacaggcatgcatgcaggcaaagcacccaacacataaaatagattaataaataaatcctttaaaaaaggatgttcttgacaaaagcttactatctaacttcctagagaaagaacggctttgtgtttcctaggaaatagtgcaggtgtcttccctgcagaacagatcctatggaggcctctgagaggcttggatcttaagggtgcttgagtaatggaacattttgtctcaaattttggaaagtgatgtgtgaattgaggctgcaggctaatgtgaatgcattcagccagaagtgattcaatttctattaaatacttaggaagcatgaaataaattattacaagtgtcttagtcactgttcttttgctgtgaagagacatcatgaccaaggcagctcttacaaaggaaagcattaattgtggccttgcttagagtttcagaggttagtccattatcatcatggcagggagcatggcagcactcatgcagacatggtgctggagaagtagctgagagttctacatctgatttgtaggtgtggggggatgatgacagacagagagacaggcagacacagacagagatgagacagagagacagagtgactgggcctggcatgggcttttgaaatctcaaagcctgcctccagtgaagcacttcctccaacaatcacacccagttcttctaatcctttcaaatagtgccactccctggtgtctaagcattcaaatatatgagcctatggggacaagtcttagtgaaataactacaataattgtggtgttgcactttaattgcaggtaagaaggctgtctttggctaaatgagcaaaagaactgttgagctaacaaagactacaaggggagatctgcagaatctgtctgctgccaagggaagtggggctcaggagaggagggtgctgccactgaagggaatggagccttctccattcccttcaggctcttctcacagcttagattccttatgattccttagggagcttgagtaattccattgcctttccaaagtcaggtaggaagggtgaaagagcattccagggaaggtaccctgggctggcaggcagacacaccaatgggcgtattataacggatacacatggtaaacccaatctccggtgttttctagtcactgagtatagattaatgacagtaggccatggtggttgctatggaaggtctttactgagcaacaggatcttaagggaggttttgaattttgcatgggagagacaggattcaggctgtctgaagtgaattctaaagatgagtaagattttggtagttggacagatggtgtttttggttagaatccttgtgtggcagcatggaaagaaaaatgttacatataaaggagtgatgtgtctaggaaatgtaaggaatctcaagtggttgatctcaagaatgcgttgagggagaaatgtgggtgtggctggattttaagggttctgtgtgttcttttgggatgagggattttggtcctaggagacaagctgtcattatatgaccttgtgtcaggaggacataattagttgagtttttcccatccaagtagtaaccgggcccgatcctgtttagcttccgagatcagatgagattgggcgcgttcagggtggtatggccatagactttagttgagttttttttaggagatagttgtggaataagtaagaggatcctcagattcagctcccctcttcaatgtagctattaagcttgggatgctgactgtcccagactagacgaaaaatgagatgctgggacaaccctttaagagattttccaggtggttgaaaatttctatgtgaattttttggatttgtagggtgctaaccggtgatgtggcctgttttcgttgcttgtggagttttgagccattgagggtgatgtagttggatgtagaaggctataagccattgaagagtatgatgaagcaagtgtaggggttcccctgcccctcctctactctcaacagccagtgttctttgtgctcagaagtcagcagtgccctctgtgtagcacttgtctgggggagacagcaatcaggaagaatgtgcaaacagctcaggcttttgttgctggatgggaatggagtcatttcctctggatagccattttgtaattctgctgaggaaggtgcatgaggttgagaaggtttgcactccctgaggtggggagaggggaagggagacttccttttccttgtaaacaccagctcttgggtagggaacaacatgattttctttgcaataggtagtttctaaacacagggaaatctttactccagctgtgaggatcagcagctcatggtttgttgaacacttggaacttgtttaaaccacatgggaggttagaatctgtctgttactaaactttcttcgttttaggttcttcagctggagtgagttacagaatgccactaccagtagtaaccagattagactgggcatggagtccagtgacagagcaattaactaatgcttgtgaaggcttaggtgttgacccccagtataaaacaaaggaaaacaagacagatgagcaacaaccaaggccctaatgttgactatacagagtactcaatcctgtgcacatgtgttatgtttgttatctcatttcttccttcctttcttcctttctttcttttcttttcttttttttctttttcttttttgagacaggtttcctctttgtatccctggattttgtagaactcactctgtggaccaggctagcctcaaactcagagatccatctgcctctgcctcctgaggactgggtttaaaggcaccactacccagataatatcatttatttcctaagtaactctataaagtagtgctattagctttggacagttaaggaaccccaggcccaacaacttgcttgtcccttcttctcccttgcacaaagtcaggagatggcagagtttagatttaattataggcaaccccagagtattataacatcaattttattcattttaaataaaattatatgtaattatataaatatagatatataggcatcatcaatcaatcaatcaatcaatcatctatctatgcatgcttaactaaaaccccatcaatagtggtagctgttcactgtgttgtcattctcactctggcctgttctggtctcttgcagaaacagctgacacaggatgatgacactgacgaggttgagattgccatcgacaacacagccttcatggatgagttcttctctgaggtgggcagtcttcctgtgttattttttttttttttttctgaatgtacacgaggaaacacagtttcctcagtaagaataaagaaacctcagatctttcaatgctggcaaaggaacagatgggcaggcagcattgttccagggagattctgttttcaattcttgggagtatctagactttacatcttattaaggaagtcagcagaaagagactggaaagatggctcaatagttaagagcacttgcttgcttctagggcagcggttcttaatgtgtgagtcatgaccccaggctgaatgaccctttcacaggggtcacctaagaccaatggaaaacacagatgtttacattatgattcttaatagtagtaagattacacttgtaaagtagcagggaaaataattatgtggttggaggtcaccacaacacgaggaactgtgttaaaggatcacagcattaggaagattgagaaccactgttctagaggaaccaggttgagtcccagtactcatacggtgactcacactatctgtaattccaatgccagggatctcatgcctcccttttgaccctgtgggcacattgtatgtatatacatgcagacaaaatgcccatacacatagaataaaataaaaaataaaaaaatgattttaaaaagtaaattatatgtaattgaagatagacttgtaaagtcttaagtacatgacaacattttaatgatgtcttttcttatttaaaattatataatttaaatacattgtcaacctaggagtaaaaatgaaactattgcttctgtaggcctttgattcatattggtcaaatttgttgtttcttgtaattttcctaattgtcttgattctagtggtgacagagggaaggagatgctattggtatgtgtttgtaaagtcaggtgcacctacagattcatgtgtactttgggcatgcaggccttacagggctgagttccagtaataggaggtggtagaagcatgtctctgtatcaggacagagatgcttgctttggagctgagtctaattaggttcagatctcagcctgcttctgaccagctattaattttgtgactgttccttaacctgctgagtcttgttttccttatgtgtaaattgggatcaatcatataataatttcccatagggttatattgattgggtccaattatgctcataaattatccagggtattgccaggcatgtatatacacagtgaatagtattaacaccctctcctccccagtctactgttcctgagtgtctgtgtctaccattttctgtaattatcttttcattctcctggaaagaaactagagacatcattttctttctgagggacaattcaagggcttcccaccatttggattgtgggtgtggagaagccgtcctccagagttcccctgaatggatttgtggagggagcttgaccgttcatgcctgctcgtctgctagattaagaactgggctgaagacctgacttgagtgtgtgttgacctgactggaaagttggctataagcctccacaccttgcttgtgggtgggtgtgacctatcagtcaaggactcatagtgagttctaacaacacttgtgttgttctacttgtggacagtagaagacaatgctcttgttcagcggtggaggtggacttgagttgatgtcagaagacattgtcgctagtcattgcaggttgccctggagcctcacatgtgttaaagaatatgttctctatgaatgtggaatcttctctagtatctgttctccctcttctcctgaatcacaggagggtccttagaggcagtatcccttgcaaggtaggaggatggggggatttggtctgtgagtaaagactagagtttgttttcctagttagtaatggtacaaggtcaagatcaacttttgttggaagggatacgaagagggtgaatactttgcagagagattcagattaccatgattgccacagagccttgcatgatagatcctctagagatggccacatgctgcccaaacacagccagggactgttactaaactatagggcacaggttggatgtggctgtttgggcaataagaatattcattctagctgggcgttggtggcgcaagcctttagtcccagcattcgggaagcagaggcaggcggatctctgtgagtttgaggtcagcctggtctccagagagagtgccaggataggctccaaagctacacagagaccccccccaaaaaaaaagaatattcattctggatggcagtgtgagattcgatagacctctgatcaaatatttgagaaacttcccttttttttctgttagagatgtatttgtttaaagatattgctgtggttttttttttttttttaatttaatcacatttatttagtgtatgtgtgcctcggcacatgtgtaggtcagaggatgacttgactcaagggagttggctgtctctggccatgggggtctaacttgggtgatggaaagtgtctttaccctttgagccatcatgctggccctctctcagacatttagaatgcacatggtcttcctaaaggctccaagaagtcccatagtgaaggaacttgctttgctaggctctctcagtgtttagcttgtcacagacctgacatggaacttttattaacaaggttgagtggctaccctttggaaaatgtaccacttctttttgggggagtctaccttagtttgggctgctgtcacaaagaacattatttggatagtgtgtagataatagaaacttacttgctgtggttcctgagcctaaaagtttgctttcagggtaccagcattattgattatgctgggttctccttctagatttcagagtacttcaactttctgtggcctcacaaaatggaaagagagcaaaggctgctaatctcattcatgagggatccagtttcatgacttagtaacctacaaaagccccacatttaaatacctttatattaagaatcaatgtgtgaatttgtgggggtacagcattcagttcattgtgggtatacttaaaaaatgagactattttgctggggtgtgaagcatatttctttctctctcaggtatgtgtgtatgcaagtgcacatttatgaatatgtgtgtgtggagactgggggacaacctcaggggtcaacctcaggatatcaacctcttttgagaaattgtctttcattggcacagactcaccagttgggctggccagggactacttgtctctgccttcccagtgctagggttacagacatgcctgtatacctaggctttttatctgagttccggggaattgaactcagcttcctaagtttacaagacaaacatggtaatgtgataaataaatgacctagagactgatactgtggttcaaacttcaagctaaagatcagaaaagcaaagcagctggccactagctcttattttacctcagactgaatgggctgatcctatctccatgagctctcaccaagcctcagactgtaacctctcttcagtgtggctggagaatgaaagcctgatactgagaccttgctcctgtcttacatatttccctaaaactgggattaaaggcatgtaatcccaggtactcagatcatttttgcgtgagctgtttctctttacgactggatcaatcttgtatagatctgatctgtctacctcttaatcctgagtcctaggattaaaagtgtgtaccaccacctcctaacttctggctgctgggattaaaggcgtgtgcctggcttctatggcttgtggctgactttgctttctgaatcctcaggtaagccttaacaaatcataaataatatatcaccacaaaacattttaccaactgaactattccccacctcttcaagcctgcttatttctttaagttacttgtattcagacattcattaaccagacatttacagagtgactctgtgtgtttggcatcatggggtctttcaagtagtctgagatgagaaacatagccatggcatttgaagcatctggatcatacttaaaaaaacaggccaagttctccagagcctgactggagagtgggctagggaagggtgtgtctggatggagcagtaggagctacagaggaactaatcttgaagcacagggatttgctgtttgggcttgagttttgttagaacctaggatctttcaaagtgattataattcggaaatccaggcattaggtcaaaaccagcaggttaagaccttcttaactctttcagtagggtatttgcatgagagggaagtaggcaagctggtagattctgatttctaggctcttccaatagtgaggcaagaagccttggctggccatttggcaatttgcttttgacctatctctccacttcctttcctgcactttgccctttcttgctgggaactgcattacactgtattatgcagattagcagatttatatggcatatatgtgtatactgtgctctgtttgaagccacctttcttactatgcccgtactttttaccttggtccctcttctaagttcctggtagtgcctcacctacttttgtgtgtgtgtgtgtgtgtgtgtgtgtgtgtgtgtgtgtgtgtgtgagagagagagagagagagagtgtgtgtataaattctgtatgagagaaaacatacctagttgagactgctttaacatgatttttttcacttaacatgataatgtctaattctatcaattttcctacaaatgatagtattttattttttatggctcagtagtattctgatatgcacacatttatccatttatctgttaacagtttcggctatgaatattgccgaagtaaacatgggtgtgaggtatttctactgcatgatgacatcatttccttcaagtgtatttgtaggagtggtgcagcagaatcatatacaagttcttttttagcattctgaggaactgctatactgatttccgtagtggctgtactaatttacaccccaccaactgtctatttattcaccatgttttttttttttatgattgacattctgattagggaggattagtgtttcaacttagttgatttgagaatattgtcttagaaaacttgtttttattagtcagtccaactctgaggtcatacttttcattcataagaagaagctgaaaaactaagtcatgaaaaaaactttataactaccacctgctctgggagatggctgggtggttaaagtgcttgccatgcaagtgtggggagcacagctcagatccccaggacccatgtaaatgctaagttggcatgatatccacctgtaattccatcctcagaagacagagataggggttccctggagtaagcagccacgtccacaaatgctgggtatgattgagtgacctgccttgatgaataaggtgtcatagggactgaagatgattcccaacatatacctcaggcctcaacacatgttcacatgtgtgtatttgtacccatatgtgctcatccacttgctaacacatgtacgcattgttacgatatatctttccaccaaaagccgccaagccccaccgctacgtgtgcgctctatgccagctgcctgcctgagttagggccctaattaatgcacagagagacttgtattaggtacaatgctgcttggccaatgactaggattatcatctgttagctcagtctcaatgatcataaatctatatattttataagacttatcttattggatgccttattggcgtccctccttgccagtggatcacattgcaagagcggaggggaaaagggacacttcctttttctcctttcttaaatgagtctccttgctatgtcacttcctgcctggaacaccacttctctactacatttcccagaatcctctttgactcctagtcctgcctaacttgctgtctcattggccaaacagaactttatttaacaatcaataagataaacatacacagaagtactttccccatcagtgcataacacacatgtgcatggaaatggaaaaagaccaaaacaacttcctcctttcagtgagatgatctcggttaatatcacgtggtcaatctaattggcagcacctaccatcaagagtcctgatgttcttagatttttgtgagtgattactgaggacattaggattgttataggattaaatgagacatacttttaaaggggtagcatagtgcctggcatataataaacgagcagttgttattactgtttgtactcattgttatcgtctaacattcattatgtacttgatgtggtgtaagcttgttcaaggtcataaaagtgctaagaggtggagctgaaccctgaacttgttctgtttgatactgttttttttttaaattgtattatctagagtctcatattgatgacagattgttggtaaatagtctgaaaatcaatagatagtaaaaaggtactggggatgcattagccttaaatttagtggtgatttgaaaaacctacttttgggttggcttaatctatcagcaatgcttctttctattcactgtttaaaaatctcctgattgtttaggaagatgaacacttccaagaaaaaactgacacaaagctcaaggagagaaagctcttgtggtttaccagttgctcaccctgaagttctaaaggggtttttgattgtttggtgaactgattaaagtgctgtttatcaagatccctgaaatgcctccagatggtgagatggatagcacacagggaataaagcagttgtagttgtagggtaggggtggtgtttgctccagaacttgaacatttagaacataagcagaagatgggatgacctggtcctaactctcagtctccatatgcctgtagtgactctgtacttggggcattatagactttgcaacttcccatgttctgtctctctaccattgaccaaagtttggaccaggattctcctagttcataagactagccacagaagccagtgttgtgtagagagaaaggagaagggcagaagtgtattgtctaaacaccaccagtgttcacaggagataacatgtgtgaccacatctggtgggttatgacttattaaattttagttttctaatctgaataataatactaatatactcttaaatgttattttgccagctattaaaatgctaagtgaaaatttgagtagttgtggttatgtgaatttatactttgatatgattacattaatatttcattttatgtttttcagcagtgatcctactgtcaaactatggtacatataagccaacatatttatagaggaaaaaatatctcttgggtggcaaaaatgctgttgtgagggatagaaagctcaagcttgatctttgctattttctgaagcattgtaattagatttttgaaaagaggtacctatccattggagaagggggtactggatttgaagtaacctatgcactgaatctgcattccagatgttaagattatgtattatgaataagatatattatgtcaacgacaaggttcctgttggttaattgttgcggtgttgatgtccccttcactttggggtgaggtagataggcacagtgggtgctgaggtttcttctgtatctgctgccccctctgtacatctgctttggggccatggtgcccaggcccctggtgccagtggatgaagctgaggtgaactgttgttgttggtgttctgtcacaaaacaaaatgctattggaaatcctttatggcatatacttgtgcagccaggaaccttaaaatgacagaaatgatccaaggctgtaacttctgggtcctgatcagctgccagggttagcctgtaatagctggttcaccagaatatatccagaagcccggctgtcttctgagatggccttgccgggtttctttctttcccctgtcctttgtcttctacatttgctctgctctctttgactgttttcctttctccccatcccatgctcattctcttctgctatcactttgggggccagagggttgttctccactgaaccttaccattcaaggtgagtattacttccctctcagggagaggagtgtggattgtaatgacagttctttatagactaatttccttgacagtggagatggcactccctgggcagctgaagattttcttcatgctcttccacaaacagaaggtggacagattgcagcaggaagctctgctaagcattccttccaggtgtggactattttccctctgttgtctttttgattatagattgaggaaactcggctcaacattgacaagatctcagagagtgtggaggaagctaagaaactctacagtatcattctctctgcaccgattccagagccaagtgagtgttgactgagctgagtcaccctgggctgagacaggcttgttttcctcccttctgggaacagcaggagagcgtatacattctcttgtgctaatgtacataccatatcacataacacctctcttgtctctctgagctctcacttccagcctccaccagttcttgtcttcatagccccactagaaccgttcaaattcctctcattccaagctcattcctctcacgactagcagtgcctttttctgctcctcatatatcccaagctctgtcccgctttgtgccttggtttgcattctttcttctgactgaagtgggtttactagctcctgtccagaactctacctaagtttcatttttattcattcttttccttatgaggtgttttggaatggttcaagttcatgaagccccttcttccatctcttacttgcttttgttactgtttctgaggcaaacttttgttccactaagtgttttatatttggagaatacagtttagccctgtattttatgtttctaagaaaagcaaacagtctgctcctttcttcctttaccttgctcagtggctctccagttcctgagcacatgggaattgtctcctcatgttcccactttcctctccacactttctcttgccacccctgccctgtcctgctgatactagccttatgctgacctctagttgttcctcaaacattccttgttccgtcatgttctttatatataaatgttctttatttatatatatcattgggatttctgctcttagtttccttggctacctagctaacctatagtctttcttttaaactaactaaccaacctactaactagctaactaactaactaactaactaacttttattatttgctaccctgtagtttttgttgagactcagttctactatctctgcctttaggggctcttccagatccctgaggctgtgctaaggttctccttaaacatcccatgcatactttgctcagaacttaaaccatacctggtattacatatcaagacttctgatgtacttcctattcatctcctgccaggctcagctccttgaaggctgaatctatatctgatcccttagtttctcactcagttctaagtgtgagtggaactgagtgatgggtctggaatgaaaggtcctagctcttgttaattttgcttcataaacccaccatgagtacggtgctccatgcattagctgggatagttctaggcatgtagtaagttcgtcataaatatttgcctcatttaagttaatgggctttggttgaaatttcttttccccagagcgtccatagactcctctcctatgtcctgagattgagcacacatggtaaacaagttaattcctttaaaggcatgactgggattggggaggcttattaaataaagcagatcctaggctctgaccctggggtatttggttcttcaggtctggggtggggtgcttggaaaatgccttttatttagttaattaataatttattttggatatgaaggatttaaaccagggcttggtgcatgctaagcatgtgatctaccactgtgccatcccctcagtttgaaatgctttagaaaacaaacaaacaaacaaacaaacaaccaatttctctgtgatacagtcacatctatagtagattctggatagcgaactgaaatgagcactgcggtggcagcaggtgtttgagaaagcttctgcttcatctgttgattgttgtaactcacgggcagttcaccctctcttctaactgagtctgcctcttatgtttacccagaaaccaaagatgaccttgaacagctcacgactgagatcaagaagagggccaacaacgtccggaacaagctgaagagtaagaagggaacacaggaataagccagtctctaccacaactagatgcagcttctcagggctcacttctcaactgccagtcatctcactgggggtgacatcacatgtcccatttttactggaggcttgggcaatgtccctggactgacctattgtatccttagacacccatcagcccttgaattctcactgcaattgaaaatgtccagaactgatgttaggaagtggaagttaaaatgtactttccaaggtgcagtggtatcccgtgccgttaaccccagcacttgggaggcagaggcaggcagatctttgtgagtttaagacctgcctggtctatagagctagtttcaggacagccagggccacatacagaaaccctgttttgaaaagcaaacaaacaaacaaacccacccagccaaaacaaaaacagaaaaatatgcttcccactgctgttgtgactttttagcgtagtccttctgtttgctggctccccagcacccgtgtacattggagaggtaactgcagaggcataggtacagggtttgccatttagccagcagacattccttactgtgtaccttctcatccctccctccttccctggttttggagcatagctcagtgaagccactgtcatacaccctccttttggagatcgcaaatgcttgcttagttccacagccgcaatccatgttcccatttaaagtgcttgttgagtatgtgttattggtaagagaggaaatcagtatgacttccctctccaataaattacaacagttactttaatgggtatagagaggaagacagcttctgaaaatagtgataatgtgattgtcctgtgataagctgttcatttgatttttacgtggtattttaaggaggttcaggttgagcatccttaatccaaaatttcctaattcaatgtactccaaaatcttaaactttttgagcattcatgacactgtaggtagaaaatttcacacctaaccccacaagtgcactagaaatatagtacaaaattatctctaagctctaaggtatatatgaaacacaaatgagtcctttgtgccatccccaatgttatatatatgcaaatattccaagtgttcataaaatctcaaacactcctggttctaagcatttcacataaagggtgctcagcttgtattgctgagtggataggatactttgtggaaggaaggacagacatgttgttagaataactctctcactccaggcatggagaagcatattgaagaagatgatgtccggtcatcagcagaccttcggatccgaaagtcccaggtaactttgtttctggtttaacaatcattttttaactattcttttaattatctttcactgttgtgcattgaaaaaaatatgattctattgtattggaaatgaggaactgggaaaagggtgccatccaggttgaagcagtggtcagggcccattgtttccttttgaccttctctcacattcaaaaggaggcacttaaagtacttccctaggctcttcagaactcagctttagcacccccttgttttataggcaaaggaactgatgtctttcttcgaaagattgttagtagttgtccagtttggagtcaggcactttggagtaatcaaaaacatgatctttgtcctatgagaactaacacaaagcataaccccaatacttgggaggtagaggcaagaggactgccaagacttcaaggctaccctgcctgagctatagtgtgagaacattaaaaaaaacaaggaaaaacaggagggaggaacctgatatgatgtttaagtggtatagtaaataaatactatatagcaggagaacaatgtaagacgacataattgaatatatggtcgtctcatcactggatgatttcttggagaactgggggtagctagagaaactggcccttgggtaagcaagagtgctggtatagagaggctcgggaggcagagcctccctttttcgagcggaaataagaaataggatcagggatgagtatgactgtgcatgtgcatgttggcagtagcagaggagtggttgcgctggtgggagtggcagtgaaggtggtggcagcggcacagggatggggatgagtataggatggatataatgggaataacgtctcttgagaaaggagtttgttgctgggtagcagatgctaactttccagcagatgatgtagtatcacactccaaaggtctttaggtactagttgagggaatttggatctgatgcagtagccgacagtcatttgtttcaggttacacagcatgttagggggatatgatagtcttttggatgtgagcggggaagaggcaagaggcttttttgcagtgatttagtttgaacttacatggaagcagtgcatttggttaaaaaaaaagatatcagtagggctggatgctgtgaggtgggcaagggattaaacttattatgaaggtctgttgagagcaaatgtctgtttgtaagcaaggaaaagttgaggtcgtcggttggggtaaggactatttgtgggaagggtgcctgacggctttagccaaggctatggtggaaaattgctactgggctctcaacttctcagtgattctctcttatgattaaaactatgatgtgaattcagtaaaggaggaaatgggtagtggaagtggcaatggactcttcccatagcaccaaaccaggaaagcaaacttgggttttgtattgtcttttggtttcaaacccaggctgctacagactagactgtgttgggggcgggacagagtttacaccatctcccggggtctactcatgtaacattgtttctgtagcattccgtcctctcccggaagtttgtggaagtgatgacaaagtacaacgaagctcaggtggacttccgtgaacgcagcaaagggcgcatccaacggcagcttgaaattagtatgtgtttgaagttgggccaatgtctgtccctaccttttcctgctatgtggttgtccaacccaagtcctgggagaagcaacagtgaccctgctgcttgtgtcttctacattctgattggggctcaaacacaggaaagacgctatgggattgatatatctgtaatatggtatcctaggttggaaagtgttacatttgttgagccaaggaattttattcttttgggatccagtcttcatacctgcaggggtcacccactaagttcttaggtcgctctcctaagaacccattgcatcgtttgctgttaaatggaaagtccatttacgaaacaaagttgtagtgctagttgctgtgaagatttaaacaattgacatagttccattgtttaggaatttagtgatatggaatggtaggccttccagggaaaatggcttcaagtgggagaagctgtgtgaacaaagatgtcaagaaaaggcagatgtgcttgactaggagtggaaggctggaaggagggtgtgtttgaagctgcagtgtaaggttgaggcagggctgccacaaattgtgcactgtcatgagagtctcggggtctgtggtatggtggttggggctaaaaatcagtttgagctgagaagtaatggagtctgtgcttagggtggggattgattgctggtaatattaaagatggattgaattgggagagaaatgagaagagtcagagggttgttggagtcaatgtttgtttgggaggaaattttaaatggagttgtgctttgatcttatattttatgtttttttttttttcttttgttacaaagctggcaagaagacaacagacgaggagctggaagagatgttggagagtggtaaccctgccatcttcacttctggagtgagtgatcgaggcaccatggacagggagggtcatgggggagcttcattgcagttgcagctgtgcaggggagggagcttatgtggggtgtgagggctctgcaggggcagtctgttacaagcgtggctgatggcctgtctgtatggggcctgttgtagatcatcgactcgcagatttccaagcaagccctcagtgagattgagggccggcacaaggatatcgtgaggctggagagcagcatcaaggagctccatgacatgtttatggacatcgccatgctggtggagaatcaggtagccggctgggaaaaagcacacatttccctgaaaaccataaatgacattttggagatctgatgggggagggaatagggaatttttaccatggagcaacaaaattctagtgtctcaggaagaggtgtgcattcttacttatcaagggttggcatttgagccagctcagtcttgttatttctacctgttacttcagtttcactgtgattctagttagtaatgaagcttcctatgtcatgacaagaacctagttcacccagcatctttttatcccctcctactccccctccaaaaaaaagtaaagacatgggggttctttggctggggaatgtgtagttcagttgatagggtgcgtggctagcattcatgaggccttgggtccaagccatcttctggtccagatctccgtaaaccaggcatagtggcatatacctataatctcagcacttgggagatggaggcaggaggattaggagctaaaggttatcttctaatacagagcaagtcttaggtacagctgggctacatgagacccactcttccttaaaagaaaaaaagggtaagtcttgctggcaaagccttggcagtcagcttaactgatatgaattattttattgaaaattttttccctccaattcaccatagaacttaaaagcaagttaattcttccagtttcgttttgtttgtttttatttttccctttgtttctgagctttttggcatttctttcccctttgaaacttctgtgttttttgttttgtttgttttttttttttttttcgagacagggtttctcagtattgctttggggcctgtcctggagctcagcattttttttttgctaagaatcaatagtagcatgaatgaagaatcagcaaaagaatatttatagagacacttttgacagttcatcccaaggaatgcctgcttgggtggaattcaatagtgcttgcatatggtcttcatttctgttaggtggtttgtccctggttcttgggatagagttagatatcatgcacggtcacagtgctgtgcaactttcatcaggaacttccagctgctcagccatctggacagaattggaaactcttgcttaatacatagaccactgaacctagttgaagcctaagcactgattggctagttttttcttttattagttctctgccctttggttttgtgctttccccccattcctctttctggcctttgagaccctttctcaatccccccattcccacttttcttttttcccaccatattgccttgccgaggatctggtttgagtttcaagtgatggtaagtgccttgctatgcttattgagaaccttatggtgataggatggggttgagaaaggtctgggtgggtgaggggcgtgctctactttagattctcaggaagtaactggagtgaccaaacttccttggtaggaagtaaaagctgggaagtaattgggactcttattaaaagactagtgtctggaggggaagatgagcatgggtaaacccaacacctacttcgtaaggagtgtgggaatttcccttgaacataagtactttctactgttgccaacctgatgcttactgaataccttttatgtgccaggcgctatcttacagtagtgaatgaactcatcttaggctgaatgaacttgatttgggtctgaatggccaagaaggggacagaattctggtgatattataaaaatatgagcttttcttattttggttcatctctatatgttaagtgataggaaacttaaaaaaatgtgacagagggaatgtctgtgtatatttacacagttactaaacatctcgaaaaactgcttcagatgttcaacacagtactgatctcaaggaagtaatgcaggatttatagaatgagtgaccactgttaaatctggggaattataggtcatcacatgggaaatgggaacatttgctcaacataaggctgttctctaaggtttctgtgtgtcttggcatgaaggctattgagtcccttcacattagctggggctgttgtgcatgggttaacaggtgtgacttgtgtctcctttccagggtgagatgttagataacatagagttgaatgtcatgcacaccgtcgaccatgtggagaaggcacgggatgaaactaaaaaagccatgaagtatcagggtcaggctcggaaggtgaggttttccttctgtcttgagacaagcgagtccattttgtttgctactgtgctttttctccctcctcctgtctgtttctgttgccaccacatcttgcatctggggaaagggagccatgattgaccgtattgagaacaacatggaccagtcagtgggctttgtggaacgggctgtggcagataccaaaaaggctgtcaagtatcagagtgaagcccggagggtgagcgcctcagtctctgcttgttgtaccttctctttctgtcttttgtcacctttatacctctgtccttaggcccatgtccccctctctgtcctagcttcttccagacccttaccttagtctttcctagagacttccttcccagggtaccttgcatggatctggctgtcacatgcttttgccccaagaatcagtacttgagctccctgtaggctggagacatggccgaggtcttaccactaatttcctgaatgtagcctatgaccccttaacacaatacacagctccttggatcttcggtaacatcttccccctagccctccattgtttctttttctataacttgaacctggcacagatgctaattgttatgtaaaagttaccagttattcatggaagtgcctcctttctctacttctagatgaagcaatttgagggcagaggatatgcagctggcttcggaacactcagcagtgtaggaggggggcctggcattcagaacctactcatctctttccaccctgtctatctgcctgccctcctggcgctatgctcaagactccgaagtttctgttcttattgactgtggacatccagttgtggcaacttctgccctttactcttctttgtttctcttgggtgctggtatttttattctttagttctttctcttccaactgctcctattgcttgtgcaactattcaggcaagctatttttcatctgaatctatggaaaatcgtactttggatacctattcagtatatgtggtctgaggtatacactggactttaagaggacagatgacacaagttggtgattaggactatgccagatatcttaatgctccctgttgaaaaggcaaacttaactgttttatggattggtcaagtgctgcttggagacctcctgataccgattgctatgagtgcacatatgcaagcctatgaactgagagctgtaggcactccacatttctactagctggctaggcaaaaaggaatttaagaaatgtaaagtatacacgagaacatttttatagagaggtgtgcattttttattgagattgaaaagattttattttcttggttagagagatgaaaaacgctgaatttttgaagagttgctattttattaactttttaataatgactttatttttgttttttattcctttctccagaaattgataattatcattgtggtagtagttgtgttgctgggcattttagcgttgattattggactgtccgttgggctgaagtaagagtggcctaaggggctgctgcactgaaaagtaagtagatgaatggttctgggggactctggattgggtccccctgaggaaatgagtctgggatttcagaactcttctcttttctaacaactgtcacaatgagctttaaaactcttggtagccttgattctttttcatttccttaaaattctattcttgggttctggctgcaggatatccgtcatgtctttgtagcctgaagactctgttcctactttgtcttgttgcttggcacactcgacacctcatttttactgtctgtgcccaggaagcatggatggatggtgggtataatctgggagctgtcatctaaattcttagttgctttcatggacattgggcttcgctttccttgtctgttttcaacataactgaagctttatgctgtggctgaatggttggctcttgaatggtacttgtaccatttttaagtgttgactcatggcagagtctgctaaacaccttgcacatgtaacagaatcctcacaacattcttatgaggcggctagtattattttagaagtagaaacacttaagtcttagagaaacatcaaactcacatagctaacagtggacctagaagagtgcttttctacaacttagtttctctttataaaataaggtagtgtttatcattgtctataaaggccagagaactctaggctagcaactgaaatttattaagatatagctggccagtaactaggcttgacattgacaaacatgatagatgacctagtagaccttgggacttaagatctttcgtttttttctaataaaacagaatatatgtcattttaaacgcttataagatatagacaagtgaagttatattatttgtacaaacatgtggcaggctcacccactctcagttttgtgtagttcatactgtattaattatatagtgcttttacccagttagaaaatcataaagatcattcttcatcactaaaatcttgttgtaaatatattctcaacataagaacatttagcatttcctcagtactggagtttatattattttctatcattaaatgtgatgcactttgtatgtttttctctttactataaattcagaaattagattactgaggtaacaagcatgaacctccttgagagctggtacagacttgggtgttgacaccaagctgatccttcattttacttttgtcccaccccagtgtttcactgcatttctcccctttccatgtgaccggggcacctgcaggtcagattattaaatcttaagtgctcaactttacattgagagttattagtgatgaggcaatcaagctcttatagattcttttgatcccttctctttatcctggcatctttctagttcctgatgacgtctgtttataaagttttagtgttgtgctcaggcttgactatctcagtgcagaacatagtaaaataaaacaaagatgtaatagttgctttctttccatatcctcagatgaaagatgccttgcaaattcttgatgcctcttagcccttattcctaatcccaagaattgagaatgtagaagactcatttttgaggaggttaacagttacttttagttgactaaccagactgcacagcattgagttgctatgaagtttcatggtttactgcatgttgtcagtattccctactgaaggcaaggttgcttggcacctaggtggaggcttagcagtcttccataccaacccacgaccaagggcagcctgtgtttacattttgcagttgcagctacagtgctgagatgccatcagtgcccctaacttacagaaagcccttggagagacatgcccactcttacatcacttgtaagatgacacagccatagtataatacctgagattttccatagtcttttgattgtgcctgtctgcttcctatgaagggagggctcctagagaggatctggatataggatgcttctgaagcttgaattcaagaggagagctgccgtgtgtcaggcagggaacaggtgttttcaactagtgtttgcacatcccatgtccttccacaggtgatagtttatatagcacgaaggcttgtaagtggtctagatattttttggtcctactattaatatacaaagtaatggggttcattatgttatgtctaattttagttatcctacctgcctcctgctggattccccaaccccattaactctctgttcacctttaatgtcacatctattccatcatcagtccccccttccactacgaccatcatggtcccccttaccgtgagcagtagttctcaacctgtaggttgtgaccccaaaagaccatcagaaaacagatatttacatatcattcataacagtagtaaaattacagttatgaagtagcaacaaaaataattttgcggttgggggtcatcacaacatgaggaactgtattaaagggttgcagcactaggaaggtttagaaacactgatgtagaggttttattcttttacaatgcatatcttttatttcacatgtccagccttgggtttgttcctgggctgtttcaatttagtgctgacttctgcatgcttttttttggtaggcatttctgatctttggtctccaaattgggggtttgtggctaattcctcgttctttagcattggcctgtatactgatcagcccctctccctacctctcttagaacctgatttcactccagcttggcctgactactcttgtctccagatgggaacggagttctaatggccttcctgagaacgaggggcacctgttcctttatttccttgtaaccacccttggacctggctcagcaatctacccctggaggaaatctaacgtacccggtgcagccctgagttctcttcaaaatcacctcccatcctagcagctgaagtaccttccctcctggactgtgtgaagcaacccaacttttccttccttctagtgtgtcaattatgccttgtgccttggaaagtccctgtgagaccagcctgaggcactgtatttctacctcatggaatattctcctggaatatactttgtaggggagtaactagcaaaatagaggggttcttctgagtttgtcagtagtgtggcttggatcagagcccctagttggcaggatgcccgtcgttagtttgttgtcctatatcctgaaaacacgagggattagcatatatcattttggccttacaagttgacttatttgaaatccacctttaattaagctccaagttcagcttgtgggacacttagatttttactctgtatttgctcttgtttactcagagggctctgggtgacagtcgtctgaagctaccattggcaaagactgaagataaggaatatgcttccgtgtctgagtcttggaaactggctagtcactgttagagaactgctttgtgaagccattactttgaggccaagcagagccagggattcacaacagggccagggacacggtgctacagtctcgggctctggaagtgtcagtcacttgtgtgttccaggtgtacttttataactgtatgagagatatgtacataattgtctgcctctcaggaagtaggaaaaacagaagatactcttgagctcaaaaaaaaaaaaaaagtgacaaggtaaactacagagcttggctaaaatcaggtaaaggatatgtttacctcaagtgaatcattgtagaaatgtgattttcctcttgccaccacgaagcttgttttctggatggctgctgagatgagaatcaaatgagacctttggagtaagggctgagttgattcccactgaatttttttgcatggtatatagtgtaatatttattgattcccatctgctgcctacaagagggttgtccagagaacatcccatagctatctgatgttatctgtactggtgaaagacttgggaggatcgtctcccataattcttatcatggaggcaacagcctggatttctttatttagtgattgctacctagtagtaagccttagatctttggtggtccctgccagtatccccagttttgggtatttaagcttcaacttcaatgttttatggtgcagggtgaacactccaatccaggtactacccaagagcttcctttgtaaaggctctttcttcagtcacctagcactcaagacagagccacagggatgcccttctccctatggctgtgacgtctgacaggacacagctccagctaggaggggacacaaccctcagtgcaggccctctctctcctctgacagtgagttcaggggatgaaagttcgaaacgagtgccacatatgaagggccattgttgttcatattttttttaaatgtaaacttgattattttattgctaatttaaaaataaatgagtttatattgattgcaaaacaggtctgggtccttctccctgcagaacactttgatgatctggtgccaccatgtggtgacttttggtgccccagaagaaactgttacttaacttgctctagtaggaagtaggcgatctgttgggaatatatccagaacacagggcaatacacagatccctgtggatctgattttaagtctaacctggaagcatttctgtgaacaagccagatccatccattttccttctggagtttcctgtcgcttccttccctctcccatgtctagctgtaccgtctccttttcgtcagaatgtgtatctgcacgctgatgccgtttctcatgtaattctctctccttacaacgagcagaagaagatcatgctcatgatctgctgtgttatccttgccatcatcttggcctctaccattgggggcatatttgcctgaaaaaggtgagctgtctggggaggggcaggcctgctgtcacttacttgacaacttgctttcattgcatgtcaccagattgcctaagaaggggcggaggttaggctcaggattaggtgaatgttagagaaaaccaagggaagggatgttctggagagaagtaggtgaagaataactgggagtaggtagtcagcgagggagatggatggggagacaaggtaaaagtctgtcccatgattgagtctggtagtatagtgcttctgaactgcaagggatgttcattcctctataaagtctgagcccttgtatctggaaatggtaaaaggagtaagaattaagtttttcattgaccttactctaaaatccctcaattccaaggttaggacaagccagtactgttttgagaatagtttctcacccttgcaaaggagaggtggtatcctggccatgaataccatgctgtgtaatatatggtttttctttccgctttctgttacttccttctgctctcacagatgggatctcaacaggcatctccaatcttccacctctctggtgccatcacttctccccttcagagtcctcaacagctatgcctcttttcattaggaaacttacaacacagggcaccaaccaactgcttattaaatgttacacaaagggggaacaaattaatgaaaatgcacaagtgaagggggtatggatgaaggaacaggaagcacagcaatatgtagctggtttagatggtccttacaggccaggcctgcatggtagagaagcataatgggtccctgttagggtacaacacagagagcctgaatactggatggtggtaaagaggtgagtattatacagtgcccaactcacagggtcttaattgaactctgtgagtctgtgtcttagatcatagtactcaatttcttctactcttaaggcgcttctaggcctcaaccttaaccaacagatgtctgcttccttcttgagggtccaagaatattctaaagcatagattgtttaagggtcggcaccatgcctatcttaaacactaccatgtccctactgcttagcatagtgctaggcactttcacatatttgcttacttgtagtcaagctttgatttcattcatggatgagcccttatgctgggttttttaattcttatagatatcatcgaaaacatgggtaattattatcagaggcttatgaaaaaataccccaacccccattactatatcatacactttaaagtgagtttttgtttttttttttgtagggggttggtaagtagaatttgggtttctattggtggtatagatttctgttaatagactctcatttgtgaggcagagatgggggtcagttttaggatgaaggttcattaactaaattcattcctccaacaaaaacgaagaagtttatattatgattcagctcccaatagtcaaatcaaaccagcacactatgtcatctggaacaaggatggtgtaaggggaaagaatgtgatcaggttattacttcagattacaccagatctgttagcagagactgctgatcagtgacaggtacaagaaaccggttcaagcacatccccaatccaaggtttccatttaaaaaataatttatttagagattattacattgaaggcactcattaagatacatttaaaatctggggctaaaaatatccttttgaaaatgagtgaaatacttgtgttctttgttggagatcttactttttaagaaactggatggaaaaacaatgttttgtcagtgcgatgttttctatccaccttcaaaagaagtggtttagtactactatcaactcatgtttcctttagtttgaataggggatactggctagctcagcaaaagactaatcttgtacggacaaatggagctcgaaccatgaagtttgcatcactcgggaccctcatttatccagcagtaatttgtgcgctccacataccttagatgctgaagggacacagagagccaaaatgcccttccttagatagtttcagacctaggaagcacaaaaggtttcaacttttgttatcagttcttttgctaaatggtacattccttgtcatatttcatgtttccccttctgaaactgacaagaagatgggcagctgggtgttaataaatatgtgttgaacctactaatctaggtactgtcatttttatccttattcgaaaaaaatgcatttgtagtcagcaaaatgtcataaacaaggcagtgtgcacatttaagattccagctgtgagatgcaaaaacaagtttcagccctggagatatgtatggtacaaggcaggaactaagagttctaccagccccccctcctcctttttttgtgacacgatcttgcttgtagccatggctggccttgaacttaattgagatctgcctgcctttgactcctgagtgctgggattaatgacatgctccaccacagctggctatgccaaatcattcttaatcttttgagcaactgaaactgaccaatgagaagttgtaccttgaggttacactcagagtttaattaggaacaatcagatgacataacttttcagaagtcatttactcatgtgcttagctatggtccaagaaccaccaaagatcctaaagacagtgaagatgcagactcagtctcaagggtctgtgtgcacgtgggttcctgtgctttgactacacacgcttaggcaggaagaatttgccccaatactgccctttctgtgtcaagtcatatgggctcaggaatttccgtatgccaagcatgttggccgtggctatgcgctcaaaggtccagggattttggttgttattttctctttctttttgattttggcgcatcttttctagagtctcacggcttacagcctttgctggaaagggcagtttgtgggcaactaggtccaggaaaccctgtacctctttaaattcacagcgtccacctaactctactatgagagtgccagtcttcacaggtgtcacgtagtgatcaatggcacctttaccgccccccatgcgctgcccgacaccttttcgagtgacgggcttgaaaggggccggtactcgccacttggcaaacatgttcttgggatccatagagcggttgattgtcaggcgcatcatttcaaaatgaccccagtggaggtaaccacctcccagtgcctaaaaatgaataggaaaattagaatacaaggggatttagaaatctgttatggagactattatgcctcctctttgacagtaactggctttaatgatacacatgaaaataaacctaagttctaactagtaatatggaggaaacaccttggggccagtaataaaggacagcaagggcagagtcactctcagggagagggaggtctttttgcagatatgacacttaagctgaggatagaatcctaataactagtcaagagagaagagcaaagtcccagacagagaaacattgatgtaatgccctgacacagcaaagggcttggtgagtttgtgtggaagccagtgtttgcaggggtgcaggagggatgcagagtggacacaaggttctgagagatcagcagcagtgccatgcaggccatcacagctaccactctggttgcctcatatccacttgagtggcaactgacattaatttttacagaaaccactcggcaagtagtgaagcagctgttctaatccttaaccaggaatatttcacttttaccaaaagtttaaaaagatctcgttgtaactgggcaaacaaggcagcaaacaaagcagggaactgtgaaagttccctgctttcacagtagccttcctcaccccctctatagtttcaagtcatctgaaatagtaagtggagatcctggcataaacatttataattttaaactaaacacttttcggaatagcaagataaaaactaatatcttgttctacacaatttcacccagatatgaatcacctatctgttcagtgtataattgttgtacaggctacctgcctgtggggttcttagaagccactaggttatcggatccactgtgacagtatcacagggcttctatacagaattccatgctatccacactctcaagcatccagtagaggactgctgttttcagtcctacactgaagaaaggcatataactcatgtttacttggctacccagtagcctccatctacatctatttaagagtaactggactatagcatctaggtgtggcagttctaataaacctggaggaagagacttcaactcaaagagtaggaaattttgttaatttcttttatcactcaccaaaactgcaaaattgccttctgtgaattcagtggcttcagttgaaggtcctcgtatgtccttcaaatttttaggttctcttcttacttttggtacaagtgggaccctttcaacaaacttaagcttggacctttcagggatggagatatctagcaggacaaaaacaaccaggaataagcaaagctacacatgatctacattctccctgtgaagattcacaccatcaagtgggagtcttaggtcactgaataatattaattccaaaggttgttattctcctgtggatgtttccagtgacaccggaatctttcagctataacagtgctttctgcagatgtttctaaacaaaattcacttgctaactccttgctctatgttcagcacctataatgggtactgttccaaattactgtttcattccacctttaaagcagcttaggtattttgagacagtcttcatgggctgtcaggtggtgatcactgtgtaacctcaatcctgtaagaatcgctggattgagtgtgtgctatcaccacacctggctacctgtatactatttagggcttcttcttttttttttcttaaagtttgaattttacatacactaaatggacaagggagaggggtattacaaagtgaagtattagaagaaaacaaggggcctacgagatgtttcaactggtaggacgcacctgctctcaagcttgcccacccaagttttgtgtctttagggcccacatggtgaaaggagagaactgactcccagatgttgtcttctgacctctacaaatataccatggcatgagtacatccacacacatacatgcatacaaaataaataaaaagtaataaaaatatacaaaaattgagaataagaacacataattttcacctagatcaagaaacataattgggcaagtggtgttctaatctccattttaaaaaggaatgtagggcatagacattttacaattaattcaattaaaaacatcgaagcaggctcttttttaaaaaagtcactgcccgtctgaatgctaacggggtacagaatactatattgtacaaaaaatatggtcttcaactgtgctgtatttttcttgagaaacaacctaagaattctctgatcagtattttaacaccttaaccccatttatttggaaaccttggaaaaataattgtgattaataaaaaaattaaatatgaaaaaaatatggctccatgctagaaataaagaaatcaagaaacctcaaagattcatcacattatcagtggaattataaaattgaaattccaagttataaaaaccaccattaacttctatgggcagttactgagaaacttggtagttaatatgcacttacaagagcacatagtcctttgtttcttaaaaactttgggtgctttgcctgcatgtattgatggattccttggaaccggaagtatagacggttgtgaaccatcatgtgggttctgataatagaacccgaatcctctgcaagagcaacaagtgctactaactgctgtaccattgctccagccctcacagttctttaacagttatgtggagaagaccctcagatgccccggctgtttgcagttttggagatctcaatatattaaagttagatttatggggctgcagctgacctggttactattgccaagtgttatacatatattctgtttggagagaagatcaagtctagttaatgaccagttagctctgacagtagatcatgggggtcacaaaacagtgtaggatgccgggcaactaacccaataggtatttgctccgcctaggtgaggaatttttacgttcttggcctctagttcttagaacactgcttgtcagcgcagtacgccttcattacctgtatttgttgaatcactcaatgaagacgggaagcagcaagagcacctaagttttttttttgtttgtttttgtttttttaccatcagctggggttcatcagagaaaaaagtggagatgacaggcgctcaccttcaaaacttggcactgggaggagggtcttcagaccagcactggtgggaagggctgcccaagaatctaaaaagacaaaccaaatcacggttggcacactctgggtcattcctgacagaggtgtctagacgtgcggggcgcaggttccactaaacgggctcccaagggagcaggcggggtctcgaagcaccgactcccgcacatgaccgggacccagggcggcaggaaagcgcaggtcttaagaacaagcatccacttgggagtgtgcggaggacgaacaggggaatgtctttcttctgacctgaaacgtgcacccgcaggagcggcgcgggagtgcgcgtcagcagcctccacatggccacgcgcgagcggcgggggtgaggattctctcggcgacaacagtggcttcctcccttcgtgaagcccagatttcagccggccggaagtcacccaggacaggaagtgacgttgagccgctccattcccttagagagtccctacggaagcggaggaaagtcgagctcaattcttggttccggagcaggtgtctgcaggttaaaggtgtggcgcgccaagccacgcccaggcgttccgtgtttctgtgagggtttccggtttttcccgcatagtgaccgcccaggattttccccttggtgtgggaaagtgtgaaaccttgaggtttgataggaaagttgttcccttaactttcgctgccttatgtcccttctctagaggatattaggaagatgccattatttgtcattggcttattaactgggcgctttcggagttttgtcctgataaatccatgagaagagctgtagctggagttttcaaggtaaaaacccaggcttggacagtcccaacaggctgggttcgatcacctgtccccaatatgccaattaaagagaaagtaatggcgaaaacctagcattcatttaaggtggcttcctttgaaacaacagatgaaggggtccagtgaccatccaagaccgttctcaaggccctggcatgagctttatttatgtttttttttttctcctcttttgagaccgaatctctccatgtagagagacctcacactatgtacactagactgccccccccccagtgttgggattaaaggcatggtgatgccttcagctttaaatttaaatagaggacaaattgaggcacagggtagggagtcggctaaagggtatgcataattaagcgccttaagtggttaaggtgtctggttgatcattgcctcagttctggtttggcacggcagtcatctcaagctggcatagttttaacagaatcaatctgtttccataggagataaattccatttcaagttgcagcctttgtcttctcagaagaggggcagcggtctgtcttcaagtttttcccttcaagaagttcaagaggagttggaggggtggctgagtaggtaagagcactggctgctgttctataggacgtgggttcaattcccagcagccacattgtggctcattacagtctacaacactagttcaagggatcgtacatcctcttctgtcctccttggagcaatcaggcatgcatgtgatgcaggcacgtacacacacacacacacacacacacacacacacacacacacacacacacacacacacacggtgcaataaaaataattaaaagaagggaacctaagagggaaagtgaaagacagtgacgtatctctgggtctttacccagaataaagacacaaagtgaaggtagagatttcagcctttccccctgcttttattaacttgtgagccctagtgatgagctgatgtcttttagtaatatttgtgtcaaagtcattgtaattattttgcaagggatttttctcagcattacaatggaaaatttgagcacactctgttacttcagaaaccttagtgaatgggacataccataaattaataacaaagggaaaagaaataatacataatcatctttttggaaatgttaggcacattattttttatgaggctggagctttgtaatcagaacaagagtatttgtatccaagtttttaggagacaatgacattagtaattgagatatgtctcttgtacttacgtcatgttaaatctgtctgcccttaagaattaatttcacaaacagtaaatataatctataaagcttttagatatactgggaaaattgcttacaaatctacacacccataaaatgcatcatttccttctccacggctggtgggagtgccaacttgtacagccacttcggaaatcagtatggcgactcctcaagaaaatgggaatcagtctactacaacatccagcaattccactcctaggcatatacccaaaagaagcacattcatacaacaaagacatctgttcaacgatgttcatagcagcactatttgtaatagccagaaactggaagcagcctagatgccctcaactgaagaatggatagagaaattgtggtacatttacacaatggagtactactcagcagaaaaaaaaaacaatggaatcttgaaatttgcaggaaaatggatggaactagaagaaaccattctgagtgaggtaacccaatcacaaaaagacaaacatggtatgtactcactcatatgtggattttagacatagagtaagggattaccagcatacaatccacactgccagagaaactagtaaacaaggaggaccctaaaagagacaaactttgtcccctggagaaggggaaagggtaactatcccctgagcaaattgagaacatgggaatatgggggagggagctatgagaatgagaagggaagaaaaggaagaatggagaggtcatgatggagaagaaaggttgagtcaggtgtagattagaagaaaggatatgtgataggtagggttttatttggggagagtggtagaggaggaagggagggagaagggaactgggattgtcatgtaattcaatcttatttataattcaaataaaaaaacttactaaaaaatgcatctgtttccaaagtgttgatggactttacaaagctaccctaaggacataactttaacttgtttacttttgtaaaggtcatatccctactcctgctctgcaaaaggccacattttgaatgaccgggaggagtcatgactccaacatttaaaaaaaaatgtaattcatccggcaacaggtgctacccattccaggcaaacaaaaatcttacttgattgggaagaatctaaaacaaggaaatagtgactcccttcttcctgtctatttcctctgcattctctctacttaaaatggtactgatctgaggggcagttttcccccttaaatttaattcagcattgtattacacagtatcgagcatttaggttttgaaattacgttctctgtaactaggagggacaattttactaaagatatttgcatgtatgtgcaggtgcccacataggccagaagagggagctgcaattccaggggcttgtaaactgcccataggtgtgacaacataactaaggtactcctaaagatcagcaattgctcttaactgttgagcagtctctttaggtactagcagttgccatttttaattgtgagcgtaacaaggaaacacaatagcaacaacaaacaacaaaatatcagccccacactgtctggataaaagcagtgagcaaaagctgggtatcccccagtttaatgagttataagcacagagtggtgataggctagttctcattttttcactgatgagtgatatcagtctttccctcatgcttttgatttcaacatttgtgttttgcttgcatgtgtactagcttgtttgtcatacaatgttttcattttactttatcaattcaaaactgcttgttcaatctctcataggcagatccttgattttaatgtgtgtgtgtgtgtgtgtgtgtgtgtgtgtgtgtgtgtgtgtaaactagaaaggggatcaatgaggggacaagtcttgagtattggggagggggaaaagagaagggaaaaaggaagtaacagaatgcacatgatatgaaaacagaaggaggacatgagggacaaggacgtttaccagcaggtgatgggtagggggataggcatgaggcaggggagagaatcaacaaaactgaagtctgaacaccccgtaatgaaacccattttatgtgtattaattgaaaataaatatggttacttgaaaacttgttatgtattgggtttcctaactactgcgtgcttgtatagattgcagtcatgtttttcattctgcagacaatctgttctatctatctggtcatctatcttaagagggtggcgtacttggccatgctcttgtacttcacgtaggtcactcgcaatctaatcaaaggcacatacaactacaattgtatacacttcttacttggggaaaacatcttcctttctgtctttctggcagcatttcaaaagtatatgtaactgtctgttcctccaaagtttagggtttaccacttgtggccattagagggcaccaatgtgtttttgtagccacacacccaaaccaagagcattcttgagctctatgagttatataactcacctgagcatgtgcatgagtttgtggtctgatgtgacagttgcatttgaattcgtcctctgtgtgtgtgtgtgtgtatgtgatttacctatttgttttattccaggttgtgtaggtatcttattataaacaaccaacgtacatatcttaaaaggttctctttcttttctttctctgcatagatcccagtctggctcaaattctggattccgtgaaccctcctatgtactgggagtatattccagtaccaccatgcctactagaatgacagttctttaacatttttttaaactaaggctagatcaggctcctcattttactaaggaagaaactggtgtttgtagttggttggatgcttgcacaggtcagtcagtgtccttattacaagcatgtacagaatggtggctcagagccttttgcttctctatccagatttcttctcacacagcattcttaggctattattttatttttgtgtattatggtggtgtgtgtgtgtgtgtgtgtgtgtgtgtgtgtgtgtgtgtgtctgtccatgtgtacacacatagaggccagagaccaacatccaggtatttccaagagtgtgtccgctctatcttaatctttgagacggggtctctaactggaactggatcctgttgttttggttagactgatgggcttcgggtacttgcttatgtctacctccctagtcctggggttatgggtgttcacatgatcccatgcctgactagtttaggtgggtgttggggattcagactcaattcttcatagttgtacagcacactctttactcactaatccacctcttggttcccaggaacaattttagtttttaaattttatgtgtatgggtgttttgtgtgtctgtatgtatgtgtatgtatatctgtgtgccctgtgtatgcagtgtccatggaggccagaagaaggtgttggattgtctggagctggagttacagagagttgtgggcactgggaattgaagagcagccaaaacttaactgccaagccatctctccagccccctccccacaccatgaacattttaaaacatgaattcacctagaaaaaatattagaaatagaagttgtgacatcatttactgagctacaatccattctggaattatatatgggataattttgttcatttcatacaactgtgtttgtatgtatgtttgtggtacatggattgtaaaggagcattcagtgtgagaagcacaagtaggagttttaatagttcatctatagaagtagtgagtgtgttgtttggtccagaagattgcactgctttccccatcactggggctttccttctctcttgccataggtgtaaatgatgattgacagtctgttttgagaaaccagaaattttatttcatgaaccacagtggtgagtaccccaggaactttgcattgtgcacagtttattccacacagtggctctgtgggctttctttctttctttctttctttctttctttctttctttctttctttctttctttctttcttttctaaaatcatggatagagtagcattgtcaatatccacttttcttggcatagatttgaaatggaattaaaaaaaccacctcatcctttggtcacatccagtagaagatactccttctcagtactgggtgaagttggctgtgatgtgctcatagttggagggaatatagtaagcagcccctggaagaggcagagggtaacagatgtctatggtgtatgtaaacttcccatgccaccagcccattaaacacgttagaggggtaagatcaccatggggaggagtgggcagaaatatgagtttgggatgtttaaggatttctttaaaaatacttttattgttattacttattcatgtgtatgtgtgtagctgcatgcatgtgaagatcagaggatgacccatgagagttgattctctctttccatcatgtgggtcccagaaatcaaactcaggtcaccaagcctggtgccagatgtctttaccagctcttgctagccctgtttaggtcttccttccttccctccgtccttcataaaatatttattattattattattattattatgtgtgtgtgtgtgtgtagagagagagagagagagagagagagagagagagagagagagagagagagagagagagagcgtgctcaggtgtaccacatgtgtgaaggtgctagtggaagccagaagagggacctgggattataggctgtcgtgagtcacatgatgtgggtgctgggtcctctacaagagctgcttttagctgtgaagccatctatctcttcagtccctaggatggatggcctccctccctccttcttcccctccctccctccctccctcttccttctcttcttctttttggtagatactttatttttctcttgtatttgctttttagcttactttacaaatatctatggatttctctttttctgcttttaggttaccattttatggagcatgtcttttggaggtaaccctttaagatgtgccaatctattttctctcatgtagaaaattaaatgttttctctgaaatgtcatcttttgtattagaagccttatctggaacataggaaccatacaacaaaatggctcaaattaaagtatttaagggatattttcacttatttttggaagattttataagaaataggaagggcagtaggctgagaatctttcagaacaagaaggatggatgatgttgatattttttatctcttaggtattttgtgcccaaatgtttttgaatataatatttttacttttactgtccttgctcccagagaagtgaagtaattggcagaggaataagtccttttaaaatttcagaatgatttcttgagatcaaggtagtgggagaagtgacaataacaacagcattttgaacacataatctgcaaaagatattgtagttattaatttaaaacaacttttctaatgattacaacaacccacagaatggcatttccattttatagctatagagacagactccttatttgtgtaacgtagatcatgactaatgagagaagctttctataaagcctgttgatgcagctcatgagttctgacttgccagtttttcctaactatatggtagacagcaagcaaaacatctctcccatggtaaaactgaagaaaggagccttcaaggtacagcactggcctcctgtgaccctgtttgggtttacagtcctcttcacggtaacaatcagtgtcaggtcaacgtcttagacaaaaccatgcctcagtgctctttaagtggaaagttgttccagcatttatgcaaatactaatgtttttctggagtctaagtttcattcttgccatgtttaccatatagatgcagttacaaacattccttttcgtgagagattaaaaagatggtgagggctgaagttttgacgaggctatgttagaaagctcacttgtcctagagtttggaaacctggacttggttgcctgttctgttgaattttaggctcatgtttcattgcatctcatggtgatgcaatattctgaaatatctcttgcattctacgagatttgattttttttctggacctcattgctagggttaataatgcaacttgaggtcacttaagacttaagactattatcttactgagtactcagcctgtttgcttaacctccctttctgagaacagtgtaagaatcaacatacttgccttgaatttcccatgtaatcaactattacaacctgagataatgcataactgtgatattaagttcttaagttatgtaatcttccatgtctctgacccagaacagtgcaagtatatcatttgttggaaacagcaaatacagaagttgaaagtgacttccccaaatcgaccattaagtttgaaagtgtccgtgtatggaaattggtttataaacaatgatgtctgtagtactgttaaagatttctgtaaattattccattccttccccatgtgatgctctctgtgctgttcaataaagacagcaaagccctttgtgagggacagacaagcagttatataacagacatggagatacacacagtgacatgtgacagaagcacacagaacacacagaccacatagattgacagattgacagccttcttcaggcaggcacaaattcagactcatgcaacagaaagacaaagggtggaagacacaggtttgatgaggcagagaattcaaatctggacttgttcttggtgaaatggcctcaaggggaagtgcttttatttttttccttaatgctacactgatacatttttggttacttggagttactcaccaatatatataattcacatcacatctcttggatttatttaccttcctgtaaaaagagtcactaataattgcagagtatttaagtaatgactatatatgacactcaatttctatatataccctattataagcatgcacagtatcacatttaccaagtacattaattaaagaattagtaaaatgtagccttccaactggaagaaaaacacattcctttgctttccttaccttcattcaaaggtgttttgccactaaggagctgccagtatgtcttctgattagcattttcagcgatattgttgatagaagagatcataaggccccaagatgtcattttggtttcaaatctaagaataaaaggtaaatatctagcacctcagttgaagtcaggcaacaggaggtaagttggagggacagatgttcaaaacagaaaatgcaaacgactgaggatagaatcatggaatttcaattaatagatagaagggttttcctttatattttcacttgagtgggttgatagttacttccatatttagatattcctgtttcatggatgttgtatagaacaacaaacaatttagtttgcacagtatgtgtttgccagattccatggttttatttctgtttggtatggtgagaactccagactaatgagtaccttcatgtatgtacaatagaacatttgcactctttataatacatacatctccgtgactcagttagatcccaaggtttttccatgatagaatattgcacggcaataaaaggcacagccatggtagaggacagtgtgcatgaggattgtttggggatgtattctattattgatcaactttagtgatgtccaaattctcagaggaccatatacaaaggaccatgggatctggtgcctttggcctccgttggtacctgtactcacatgcacatacatgttcctcacatagttaaaatcaaatcaaatttaaaaattaagagactcacattttagagaaacatatgtcagtccatgaatatgatgaatcataactgtttaaactattcatagaaaaaaatccaccagattattaaatacctgattatattgtggttgtggaggcagtttattctttgtggttttctctgcaagtttctattatgtatcatgtgtcagttttatatttacagacagaagaaaaaccaggcaatattaaatgctaaacttgtaaagtatatccagagggtttgggcgtcaagtgtcctcttttctatgcattggcatggtcccttgactcctaaacagtgactccctatcttcctctgttgcttcctctttttgccaacggttgacatttcccaacatttaattctcccctctgatccatttccatattctactctttagtaacaggatagtgggtagaatatgaatttcaaagacagtcaaatccatgcttagctgtgaaccctgttagttagttaaatgttatgtggtcttaaggagggagacagggagggagggagggagggacagagagatagatagatagagagagggagagggagggagagacagagagagagagaagagagagagagagagagagagagagagagagagagagagagaggatggatttatgggaatttgagtcaggcttggggggtggcagcatcatttgcaccactcacttgaacttggagtctttgcgctgtgcttcttctagtacaacaagtagcacagatccacttttcacactaacctcgatggtccaatggaaggtcaggtcaacccccttcagctggttgtttatggtgtatatgacggtaatgttagatactgaggtggggacaggggtaggatagtcatttacagttggtggcactccgtgatctgtgaggagcaaaaaggccaagtttattaaagattttggtgtttgagttctggatacaaaagtcattgttattgggaacttatcccagagaagagttcaagaaaatagtgtttaggttatttaatgaaatagaatcttggcaagaactccatgttaaacttgtgatgccactgggaagcagcacagaagtgaggctaaggtggcaatgtttcatttgctggcagtgggtttgcttgagtttggcccctgtagatttggcactgaagtctatgaggagcttataatcctgtcatgtgaaattagtgaatgcaagaggaagtatttgataagaaaaaaaaaaaagaatcgaaggagttgatttcagagaccttttctggaatgacaagagttttaggaaggctctgaataggcaatctgaattttaattatctcagtattatatttgattggatacaaaaatgctataaagcaatgtgcaaggtttctacctgatcctgttggtgttctgtgagtgtcaggctgtcagtattagataaggcttaggtgaattgcatctgtgccctttaagccctccaaataaaaccaacaattggttattagtctcctcctctctttccttctcttcctcttttgcttttgccatgtagatgatgttgatttcttcttaatagtgatttcattactgtaaagactgtagttttgtctacatgtctgtcttctgattttgtaaagagcaaataagacatgtatgatgtttggtagcacatttgtcaaatgaatgaagcttcctatggtgaccatgggccatctacctccttaaaggaggtgttcagtataaggagctgaattctgaaggctaggcactttggctgtgtgtgtgctggtacacatccttggggattgaagatcagttgtagctcttccgatctgggatgaattgacaaagcaatcttatatgccattcagcatcaagctacatgccattatactgtaagtagcaactttatgacataagaaggggaggtcattgaaaagttcttaccaggaccacaagttactcgggggacatctaggtaagtcttgcctttcaaggttgggagaatttgagaaatggacatggggttttggaatttcccctgcttaatctccttgagtattgtatccatagtcttctcacagtcccatttcttcataggttgctcaggtgtcacagagagagcctaggacagagggggcaggcgtgggcaaggagaaagaaagagaggaaatgttaggtatggcagggagttggctcttatgagggatgaactttattgctaatcattatgatcttctagaatctaatctgaagcagcacaagatttggaattgcatttgtctttcacagtgtctgtcccatgatagtcgttgaaggactggaggtgtagcatggcaaggcatttgcctagcatgcatgaggtgtgggtgcaatctgtgtatcaataacaaacaaaaggatatttaaagaaataaacaatgtagggctggagagatgactcagtggtgaagagcccttccagaggaccttggattgattcccagaacccacacagcagctcacaaccacctgtaactccagtttcaggggtactgtcaccctcttatggcctcctcaagtattaggtatgcatatgattcgtagacatacaggtaggcaaaacatcctgtacccataagataaaataaaacaagtaaagaaacaaacactggcaaattcttttaaaaaatacccacacaattatctggtcaatgaatagagtcagaaaatactgctaaaactgctgtatggactggcacatgcactacacagtttttgatctgtattttcatgcacaccttttggtggacttctccaaaagcacgtgtctatgtcaggactgtcatagcctacatagccctggccttggggtagagtcatgacctgggttgcacttgattccttgggaacagtgactggaggatgcacgcaccaatcagtccttccctgatacaccaattctgaaggagaaaaacatttctcttgcttgtatatttcagttggactgtataagtaaacaccaagcagtcattgaccaacttaaattccacacagcaggagagaatgtgtgagaccagggatgagagacaactaatagtggtcccttatgtcatcatttgatctttttattctggttcttcttgaaaccacttcatccagtcctggaaatacccaggtatgtgaaatattgaattgccatttttaaaattgggcttctggtacctgaaaaatggattactataccaaacaactcacttattgcctagttttctatctggggtaaattagaaagtgtaaaccctgcttgactttggagggggtatcatttgaggatccagtgggcaagggtggaaaagcattttgcaaggcatgatgtggaaacgaccattgcacactcccttcccttacagttatgccaccaagtatggtagtgagctgtgttggctaatgtcagatttgcatgaggctgggaagagaaaatgggagaaggtggaggggagtgagagatggttgtttcagctagggaaagcactgtgggcacttggacctttgtgatgggcatggtccccctgttaactttatttagcaaatgcacaccaccagtctccatcgaggccactttacacggcaatttggtctaaggctctcctcagcaggcaggcagggagaagtcatgtgtcttaagagacaagaaatcttcatagtgagtgttagctggatatagatgaggtcttgtccttgataggaaaaacgtttattctcaggtgtcatctaccagagtgtacctagaaagtgatgcaatcccaagcagaattcctaagccaaatcagcaaagtaaacagttctgcatctgtcactaaagcaatcaaactccttagacaaggttaagcacatgaccccaccctgccagactcagtcttaaattcattccttcaggctgcctcctttccccagaaatttctagacgtgagttctggggatgattttgtgtggttcagtcatgagaaaatggttttgttttgtgataaaattccggtgaccatgacaaagaagctggcttttctctactacttccacgtatggtattttgggctagtgatttgtcttcattcttatgcttgagactgactattacatgagctgtttggactcttccctaaatttttagtgtgtggagggaaccaacaccagtctctctctcttttttcccctaggagatgattccttttaatagcaacatggagctacacaaagcttaaggctgacattgtaattctagtcctctccctttcctggggtttctgaggttgggagttcatggtgcagtttttctcttaatttcctaagacatttagaccattaatatctcagtatgggctagaggatttgaccattgtgactctataatttctgattctagttgttaatctctccccaccatccttgatacacctgctttccgtggataattcctgctctagtcaacaggaactgggagatggtgatggattcgaagctgtcaagtagcatctttcctaatttaatcctggagatgtgtaagggaggcatagaatggtcagcagacctagcttcttagatttggctctgctatttactgggttattttttattatttatatatatttatttgtgtgtgtgtatgtgtgtgtgagagagtaatctttaaattatttatattaataattttaaatgcaaatcatttttgtgggtaaagataagcaggaaaaaaagaatacttttctggtaagtctgaagcagaaaattccatcaatatttttggaagacctacttgtcatatcagtatgtatgttctaagctttcaatagtgtatgaccactactagtaaactggttattatggtaataaaccctcaaaattcttgatttatttgtttcattttctttccaagaaaggagaatgaattcttttaggtttgtattcacattttatctatgagctagcatatacctgcgttttgctagtggagaaactgaggcaaactagttcaggaattgaccccaaatcacattagttggactttccccggtatgttagtagaaacaaagtcccttggtcctacagttcagggttattattttggcctaagccaggagtatatagtatgcatttacctgcatggcaaggccagtgctgtagatgtctccgatgatgccatcagatttgatcctcaagctgatactatccacaagaaccttcagtgcctcaccaaacaagtctctgtaattttcctcagaacctacaggaatcctattgtacatgcaggtcagggccaaggttgctactgcttctgtgtctggaaggcagagggtagacagaccccccaccacaatcaccaccatagccaatattcatcagctgcttattgtcatctggttattggaccttctttagttcttgggactacttgtggaataggacctgtaagtgtcttcatttaagagatgaggaaatgggagctcagagcagtaaagtacctgcccaaggccacacagccagtaagcagcagggccagatcttaaaataaatgtatacaacagaacagctccagactttaaaactttaaatagtgcaaatggcggtgtgttcaatcccacttctcttatcccaatgttgatcttttgagatatcatcaattctggaaggactggctgtcacacctcagtgaaggcatattggtcttttcagcacagtaacccgagtctcattagcatctgtggtttacgcctgttttactctgtctgcattctgtgtcatatgtgtggttcctgggctctgtgcatgtttgggcagtgggaactttgcaaccatcatagcacccagcccagagacttttcattttttgcatgtgataaacatgtatgggcaaaatgagcaagttctgacaagactagaacaagtaaaatgctatcagtatggcaacttttatctcactacccttcccatctcatttgaaagcctcatagctccgttaagagcgacagtgttattgacacctaaagataaagaagtccacctcacttactgaactgacagaggtgccccgaccatgtgtgatgttccagatagagagggataccatcctgttcttgatccccaggaagggttctagactgtatccacctgcttgtctgatagtaaaaagaaaaagcttgcagttgaggcccgtggaagtgagtgaaagtctgagatgatattgctcaaagagtggcagaggaccatgacagtgagtccatgccagaagccccaaagaggaaagatcattacacacagaaaggatgaaggaaggaaatagaaccacagaggaaaaggatccattcgtaagcagctcagaataggtaaaacaaaggaataagaaggtctctgttaaaaaaaaaaaaagaaggtccccgtattggtttcagaaaataactgtgtgggacatttggatgtaaaaaggagaaagatcttgaaattcagagtatgggaggattaatacaaattaaggagtgtagagttggggtgaggcaggacatctatttccattttatttgaaaaataacatgtgacttgtgacatgttgtttgtcccagtggaggtctgtcattaactcacatgtccaacaaacatttgttcaatgtttttcatccacccacaccttcatggctctcagctccacctccatggaagtttcctctcccttacttctccttccatcactaactcttgtctactgtgactctgatactctcaccgtggtcagtgtctgatggcttcaacttacccacactgaagggagaagggtcactcatcagtgtcttagcaaagagtgctgcgatgggcaaggtcgcctctgagttcttctggcacagtgcgaggattgccagactgggcccatagaaggctgagggatcagcaccggggcctcaggagacaatagagaagcatcattagattaacacttaccatactggagaccactagaaaacctgtcaccataaaaagccacactattggcaaaggatgacatcagtgttttcagagtaagaatgtcatctggcatctgaagagaagagggacagtgctgactctgggaggatggtggctgtccagtccacgcttggggagttggcttctctagttccttttggctcagaagtgagtatctcactggtggaactgtcagagcagaggcggccttatgtctctcccctgactttccactcttcaaacatccataagtgtcctttctgagctaaaaagtcccaggaaggaccctgcagcccattcttccctccctcctcataggtcttacttgaaggttcccagttttccattttcttttgcagaatggatacttgacttccagtgtctcggcaggaggaggtgagagccataatggtgagggcgagctgcccttttgtcaggtctgtggaacagatcagaatgatgagggcaggcattctcaggcacagcgccaccaggggctagactcagggctgcacttgcttttcaaacttacactatgtatacactatgtatttattgttataattattactgtgttttcctctctctctctctctctctctctctctctctctctctctctctctctctctctgtgtgtgtgtgtgtgtgtgtgtaagccacacacacatgtggaggtcaaaaggcatctctgtggagccagttattccttctaatgtctggggctcaagctcagttggtgaagcctgcgtaacaagcacctttatcccaggagccaccctatcagcccgcctctcagctgctgctcatcaccttccccttttaatttttgagatgcgctctatccctggctggtccgagctcacagagtgctggggttccagctgtatgtcagcacacacacacacagcctctcccagcctatacccagagccccaaatccagggtttgcatttctcagtgatgcactcctatcattttaaattatcttttttttttctgaagaaagaaatgtggaaataaatctttgaggaaacattgaatttagttagtgttgtctatatgactcgatgactgtataatgaaattaatgatttcatataactaatatatgctaagaaaagaatccctgctgtctgtttaaaaaagaaacaagaaaacccatgaaagtctgtggaaacttacaggtagaaagtaaacttggttatgcatctagaacctcaaggaaattcacgtgaagtaaatagaccctagactttgttgttactgtcactattgtaattgtttttgtcctgagagggcaaggtgagtgaggggcatccagtgacttgttcttaagcagcagattcagaaccagaagcccttgctttctgcagtgagcctggagctccctgtgcatccccaccctctttcctgactattctgatgtcacatatgtttagttacaactgttttgctgctgtgtagagaaagatgaatgaattggggtgggtgatggcatagacatggggtccggggtagcctgtatgtggaagattcaggcttcagggaggggctccagtgtctaacctgcattgtcactggctatgagcttgttagtcaggagcttctgggcctccagattgtaggggccggccaggttcatggcaatgaggatgctggggtttacgaagtttgacttggccactgaggtctccatgagaacttgtaggccatcgatccagggctgctcttctggggggacagctgagaaaagaaaggaaagccacttgccatacccccatcactcatgcccccccccccccgccctcagaaggcttgggaggtttgaggatcaagtaatagaagagaaatgcagaaaatatcaacatgtttctttagaggctcatcagtccttccatcttcaccaccaatctgtctttaaagtgagtttttcatgtgctagctttaagcagtacagctcagaagtatttaacgtgatttctaatcatttcctagaagtcactgatttcttttgcatccatttccctctactctttcatgaaaaatattgatgatttgaggcataatcttctcagcaaataatcaagcctcgcatgtggtctttattactactatgtatctatcttgttacagcaaccaacattcctgtaatcataattgactctctctctctagaaagtgcattgatttgactctcaaagaattatgctatgaagtcatgagagatgagtgtgtctccatcctgacctgtgcccagcacttcagagctcctatagcgattgctgttctacctctttctcgtcagtagaactgtgcctgagatctctgcctctctggagggagattgcttctttgccagggcagcaatcatcatactcacagcaagagctttgggctctggtgctggttcctgccatagcccagaaaacatatagaaggcagaaggtaatccaagccatgccacgcattcttgtgctgtccacgtctccctttccactaacacctagtatttactaatgaggtgtgcctctctcttatttttgtaaaacagtctgctccagacacagccactcttaaatatctatgctgacccctcctaccttgatataactcattcccatttgcttatctgaatttacttactgtataggccctccatggtgtgtaaaggtgacttctaaggagcagaatgatataagaacccgagagttgggtaatgcagcaaagacaatgagtatctcttaacaaattcctgagtaattacaggtaggaaatttgactaatatgtgagtatagaaggaacttctcctaggctagtagcccctggatgtttgccttcaatgatttcatgaaggtttaggtatttggtaggcactagctcatttcattgtgcagggcaccctttttaggctctttggtggagatcttacttcaggcacatatgaataactacacgcaattgagtcaacctgcacctgagttccagtccagattacttgaaatagtttgatttttagataaggagtggttttcaatttcatggaaattgttttgtttaattttgtttctcctacccagggataaaagtaaactctgctacctgtagctttcacatagaacaccttttatttttaaaatattaaattaatttatgcatgtatgtgagtattgtacacatgtaggcatgtaaatatgtttgtacatacatgtatgtgtgtgtgtacacagaggcaaggagagggtattaggtgccattctccataatttttcatctttttcctttgtgacagggatgttttcctgaactttgggtttgagttttctctgctaggttggaagccagccagccccagtgatccttccttctctcttcccattgggcatttgtgagaatacatcttattatgtgcatgctggcatctgaactctggtactgatgattttggaaccagtgctcttaaccttgtgccatctctacaactccagtactgttttttaaatgttttagttagggtttctattgctgtgaagagatactataaccacggcaactcttgtaaagaaaaaccacttaattgggtgtcttacagttcagaggtttagtttattataatggtgggacatggtagcatgccaccagacatggtactggagaggtagctgagagttctacatcttgatcaggcaataggaagtggtctgagacactgggtgtggcatgagcatgtatgagacctcaaaagcccaccaccacaatgacacacttcctccaagagggccatacctactccaacaaagccacacctcctcttaatagtgccagtccctttgggtgccattttctttcaaactaccacattaaggtaattagaaaatgtaccctcagtgaatcaaatcgaacttgctggctttcccccccccccacggatacagtcacactgtaaagtaaggtgagctcccctactcacagaactggaattagcatcttgagactccaaggggctgattatttcctaagttttaagtcactgcagtattgaatgaagtcagtatgctaatcactcatgaggctctgcaaggtgctggcttcctatataatcacactgctaaccacttctctcgcctattctgtggcatatgtgtagatctcttgtatagaacttcttgaaaacttcagttacctttgtcctttatatcccttcttgcctaggatactcttccaaatatcctcatggctcctcactgctgtcacatatctgcagaaagggaagacttgagaggggcctttcagtccagtccacatatgacagcctcacccgacaccaaccacaccccttacctgctgtgactcatcactctcttgcataccatgtgttgtttattctgttttgtctgctagaatgcctgctccaaggaataggagctttgtctcttttctcacagatgtatccccagcacttgtggcttgaatgtatgagttaatgaaggtatacaaggcacaggctctaaagtccttttcatgttttcagggaatatttgtggttttgtgaggtgagagcatggggtatctattgggatacactggacagcatctgtcatggccctattgtccaccttctgctgcacacgtcgttctatgttcctgtggatgttgtgcagggtggtctctgttcttggggatgcacacagcaggagtgatggattgaggttacaaggtctgatttttcttgcttgactttgctctgtgggtcttcttgctggtttctttgaggaagccacctgcccagttgtgtgctaccttatggagaaagctcacatggtaagggagtgagagaaggctccaaccagcaccgagagacagggaggaataccgttagcatccacatgagtgaacatgatgagctttgagatgaaggcagccccactgtagctttgtgatagaccctaagccagaagaccagttaagttctgcctgcatttctaactacaagaacttatgggctaatagatgtctgaggtgagttttagtgtaactagttatgtagcaatccacatatctaatacatcataggtagaatgagataggatgggagagacagttggttctcaatgatggagggggctcatatgccatgtgaaggagtggtcagcagaactatgctgtactccatatgtccatatgtctgtggcctaaaacatggaaccatagtcatacttagcataagcatgctaagtatgttgtacagcaaggctgcattaatggtacacagagaattatggttgccaatgagctggttttaagatagtaagatgagctctgatcttcccagccaatctagtgcagtcgtaggggtctttacaagtgaaagagagacaccagggatatctgagtcagaggagctatggccatgacaaaagaggctagagtgatgcaacagctagccttgaggatggaaggcaaattgtccagatgctgaacacagccttttaacattttgatttcagcctggtgagaccttctaagctataaactgacaaatctgcttgaagctcacaaatgctttgtaatcagttcttcatcaaggactaggagcccagcatgatgctgaccttgggttgcagagcctggtggtgagcatcctgagatgattcacaggtctgctgtgggccagctctgtaaacactctcctatataagctgctaattacacccaggctggctaggacacagctgttgcagttagcaaataactcctacagcaggaaccccagaagccacacatttcttagctaataaattttaagagacctcagttaatttgttactgagcccacttgtttatttacttgtttatttactgcgcctaccactttgtatcgagtgtcttgactgactctagacacttgtacagtttatttgttgtgcttcttgctctgctgtaggcagcagatggaagtttctttttttagagtccatctggtttcagtaagaattccaagccctaggagctccttaaatgacaagtgtggccagggggtgctttccatggcaatgtcagcaagtgctaatgcaaggtccttcattaaccttaatttctatttgagtttaatggtctttctctcagacagcaatgttactatgttctctcgtcctaagccacaggctgggacaaactccattctgctaaaaatggagtttggtgttagacaatgtagtagcacaaaatgaggcttgatgtctgatacaatcagataatgaaaagagacctgcaaaggggatttctcatatttaattcatgagcagttctaattgtattgatacattgagagaaaggcagaggtgtatttcagatactgcctttgtcttactcatgtgcagccttccccaggtgttttttttattcatctatttattttacatccagaccacagtatccccatcctcccctcccattccctctcctctttccctgctccccaattccttcctcttctgtctccattgaggaaagggcaggtctcccatctgttttatgtaatcggttacactgtgaacactcttaccagtgttctagaaagtatcatactacttgcaatgaacagtaatgtcaagtcttcattttgtgcctttgttacatttaaccattaatcttttaaaattttattttttagtgtgcaaaatgaattttattataatgttttcatgtatgtatttcatcatacttggcttgcattagccatacctagtacacttctctgtctttcctctcttttttttaattaactactagtttaatgataatatgaaattgttatctcagctgacattgctgagataaccagcagggcccagaaggactgacatgacacccaggactctagatttgctttcaagaagaaacagatacccaagaggttagttcccattattgtttagtatcaagggcatctgatgcccttgggcagtaaaggccagggtagagttgagtgtaagaatggagggtcagtattagaaggtagtatgtggctgtagggctcaatctgtataagacaggacctctggtgtaagtgaggaatctaaggttatcataaagaagacaagagccatgtggaaacattactaaaatattgtaatcctgcatgaaggtatttctcttttgggactactgtaagtgcgccttttgccttgtggcatcttaaagggacatctgcatataactcaggtactcaataggaagtgtagtgctctatgttgcttagacacaactcagcttctttttatttaaatgagatcctgcagggatgaaccttactttgcatgcatatttaatattaggaaaactgtggagaaataaaaagaaaataaatagaagaacaagtgggatccaaggaaacaggtgaggagggatggtcctgttccttaaacggtgggcaaagtcttaatgttcaaatttcacactgctctcactgcgtgcataaagtcagaaaaactggctaccccacctcgaaaccatacctcggagagcccagtctctgaacaagttgatgtcactggttgctgctgaagtaccaagcccagaatcatgtcctcctatttcccagttgtccacattgtcaacacactgtggcagaatctagatcagaactccatcagttaggtctcagtctaatcatttttcacttcttcttaaggtggtcttccttctaattactgagaatcttaaaaaaagagccaaacgtagctgatgggggatgtccttgtgtatatatgtttctcttataggttgatgaataaaacactgattggccagtagccaggcaggaagtctaggtggggctatcagagaaggaaaattctggggagaggagcaacagggagatgccatgtagctatcaggaagataggatgagctgggtgtgctctggtaagataaggccatgtagaaatacatagattaataggtatgggttaataattaagagagctagccagtaagaagcctgagccaaacagtttataatcaatataagcctcatgtgtttatttggggctaatcagctgtgggaccaggcaggaaagaaactctgtctacacacagtatgtgccttttatgcagtagttggtattctttgaaaattcagagagaggagacttctcttgtagggactgtgacaaatgaaaaggaaggcaggaggccatttctggacagaagcccactgcccagggtctgaactgcttagtgtttcctccagtgaacttcctggtattcttctttttggacaacatagcttctaactcctgtaactgagtctagttacttggtcacagaatgatcaaaataaaaaataccatttcttcagctcatttggttcatttttctcatttgtgaatgctctggatcttttgggcacattttttccttaccttgcctcagtggcttgcctccactcaaaagtgtccagtagattctgtcatgttttttgtcatcatcataatcatcatcatcatttgcttttttgagacagggtttctcagtataacagctctggctgttctggaatttgctctatagaccaggttggccttgaactcaaagagatctgcctgtctctgcttcccaaatgctgggattaatggtgtgcaccaccaccaccaggtgactgggtcattattttttgccataaacagaagtgatgtggaggccccataaaacctgctccactgtgaaactgtgggaaacaaagaagatttgtaggaacttacaattctcagatatattccctaagcattttcatacccaatactcgtttgataatattacaaaaaatacaggcttcctgcttgtatactcaaacaactggattcttatgtttgggctagagggtaggaatctgaaaattttataaaaactcaaggtgattctggtgcaggcactcatgtcaagttggagacaggatgagtatggttttttacccacccaaggaacataatacatactttagcagtcaacagatttaacctgagtcagtaggagaaagtgttagcctcaaatcggagagattccacaaatcagtgtattattttccttctggaaagaaaatcaaatataattcatgctgttcactaaaaaaacccatgtctatttgactttgttctgtcatagttcttctttctggaacccatggaatcagctctgatatttatatttatcatcttacatgtacatattaatgattctttcttgctccatagcactgtccatcatgttcctaataattgtcaagtacatttggggagccaaataaattcctactttcagaagcatagtcaggatcttaatttttattattaattaaatttattcatttattttatatcctgactgcagttcccatcccttctctcctcccattctccccttctgctccttgcacccccaatccactcctctgtctccatgctttgttggtgtcaatatcttaattttaatatttatatccttaggctaagaccccgatttaaggcgctgtgagtcttctgagggtagaacatggataggcggacctcctttgggaagttccaatttaaacactaagtctgaatgtgggttcagtgttctgagaaggtccttcattatattattctggttttctgagaactcagtgattcatagatagtgaagaatttctgttccagacattgctatctaactttaggagtttctatttttgaaattttgctgaaggaaagctagagccctgagattcattaacctcttaggttgacattagattaatacttattacatataataaatatcttaaagtttgcttctattcagacattcctaaatagacattcctaaatagatgctaatagtgctttctccatcacatgtaggaagacagaaccacttgggacattgacattggtggaatatatttcattgttgttgacagaataatggatagagatgtgtgagggcaaagaagacacaaacatagacatttgaatggagatggttttgaccactctgttgacactcagtgctttctttcacagtacttgcaggaactgcagtgaaatatttcagaattgtttcttaactgtgtttaacatctgtccccctgccagactcaaggcaggtatgtctttcatattcactattgtattcctatcacacaatgcaaaaagtctgtgatctaaaagtttgccaaatatttgctgaaagaaaccccagaccattaagccaactgacaataagtaacaaaaactgatagataatctcattggagaaatgttaaaagttttacagtaataagatgggaaaaataaatagttgaagtgacttggcctaggagaaagttgacttaagcatagagtttagtccaagtagcccaagcattaagcatggtgcagtcatccacccagaatttccttatgatcaagacaatccacactcttttgtctcatttctcttcatgcttctaagtaagtgcatgggattcgggctgttttcttgacttgctgaacgtgagtataagcatcaagatatttggtaagacccagttccctaaaggcttgggatctggagcaaaggtacagtgggagcatttataagacttctctccataaaagtataaactaactgaagaaactgttaaacaaggcctagtccactctcctattttgacaaagtagctttggtgatgagctaaaaggtagactttagcttagaatttgatctccacaccaggacagtgcagggcagtggtggtgagagctcacccctgccttccctgctcatgttcaatagacacattgtgcctctccagcctccgccactttgagttgcatttcaaggggcttcctgtgcaactgttggacactccagatgacatatccaaggagtgttggctgtcactgagaccagggcttgacacacacataggaaactgccagtgggtatggctcatgcaagtcttggacttgagttcagtgtcatttgaatagagaattctaaaaccaaatgaagacaccacaatgagcatccattttgctgggtttaatttttagcattttattagaagtatttcatgtacttctcagccataatagaataagagtgaaatggtgtgtgtgtgtggcgtctccgcaaatgctaggccagcagaggaacaattcccactaggcaagaaggaaatccattcaatatgagtttgttagcctgtgttggctcaaactttttttggttatttatttatttataaaaatatttaaaacaatcttattttacataccaatcccagtccccccctctgtcccttcctccctctttccccacctttctccatcctacactccatccattccttagaaagggtgtggtctaccatggagagtcaacaaaatctgtcatatcactttgagacaggaccaagaccctccccctgtatctaagctgagcaaggtatccctccatagggaatgggctccaaaagccagatcatgcactggggataaatcctggtcccactaccagtggcctcataaactgcccaagccacacatctgtcacccacattcagacggcttagtttggtcctatgtaggttctgaagctgtcagtctggagtcagtgagctcccagtagctcaggtcagctgtttctgtgggtttccccatcatggtcttgacacctttgctcatattataaatcctccctctcttctactggactccaggagctcagcccagtatttagctgtggatctatgcatttgctacaatcagttactggataaaggttcctgtgataacatttaaggtagtcatcaatctgattacaggggaaggccagttcagataccttctccactattggaggagtcttagctggggtcatccttgtggattcctgggaatttccctagtgctcagattctccctaaccccataatggctccctctataaagacatctctttccttgctctccctctctgtccttcccccaactcgaccatcctgttccataatgttctcccactcctcctcttcattcccccaagttcctgattactcaggagaacttgtctatttccccttcccagggggattcatgtatgactctcttagggtcttccttgttacttagcttctctgggttgtagattatagcctagttattctttgctttatgactaatatccatatatgagtgagtacacattgtgtttgtctttctgtgtctgggttacctcactcaggatgattttttctgattccatccatttgcctgcaaatttcaaaatgtcattttattttttggttttttgagacagtgtttctctgtgtagctttggagcctatcctggcactggctctggagaccaggctggcctcgaactcacagagatctccctgcctctgcctcccgagtgctgggattaaaggcgtgcgccaccaacgcccagctaaaatgtcatttttttttttaatgtctgagtagtactccattgtgtaaatgtacacattttctctatccattctttggttgtggggaatctagattgtttcaaggttctagctattatgaataatgctgctatgaacatagttgaatgttcttgggtctgagcctgaacagtttatttttgacacatttaagcacagtacagctttggaaaaaggtttcctcttgatgattatcacaacaaagcttaacacatgaaggactgcatcgaaacttctttgcaaaatacctgtgacctcttctataagaatggccctattgactgggggattcaggtaaggcctggctctatagacatcaaaagatcaccaggttattaactacatcaaactccagggtcgataggaacagttgtaagtcccgtctgttgaagacaaaagcctacaagtttaccattcctcgtttccccagtgctatctgtaaacacaaggacctcatgaactctacaaaataggtcatcagaaatgctgaatttgctattgagtctatgcttttgcctaggagacttacatgaatgagttagtggtgtggctctgagatgtcccatatgtggaggatggaagacaacattgaatgctgttcctcacatgccaccttgtgtgagagggagtctatgttgtactgctgtgtgtcaggctaagtgcccatcagcttctgggaattctcatatctccatttctgaccttgctgcaggagtactcagttatagactcattttttttttttaacttgggttctggggtttgaaactcaggtcttcacatttttgttgcatgtgctttacacactgaccaaaagcctagccattggctattgggagcacagaattcacacaataccttcaacctattcatagacaacagaaaagccattaatgattaacacattttattataatgccccgtgaagttaaaaacaaggataaaactcaggtcttcaggtttagtggtaagattttactcttctgagccatctcaccagcccttgggtagatatttttttcttgccagtataatcatttattaattttcagggcatacccatcactatatagtcataaactccttttcctttaatattttttgtccatgttttctttttgtttaaatttacattttttattttttgagaattttgtatgtgagtcatatatttctatcctttctacccctccctcttcccactccaagtcctcctgtgtcccttgtctactctttcaaattaaaaaaaacatagccttctttttacattatttttgttatgtatgcatatatgtaacatatattgctacaaatatgtgtctgtaaccactgagcccatttaaagttgctggcaagtatgttttgggggactgactacacttgggtgggccatctagcaggggattatccttaggataaactgattttccctctcagcagccgaagattgcctgtaattcttcatctaagagtgggaccttgtgatatttcctatgtctccatcagcatgcagagccatgtcattatgcattctccaggcaatcatattgttgagattttatagatgaagctttcctggcatgtctagaagtcactgccttgaaataggcatggaatgtgtgtttagagtcatcttttcttcatccccagctacatacagccaggataattataataggcttactttggatacatgcttttcttgattagttggagaaaatcttttcagacaggcaactttcttaaatattgctaagaatacaacttacttgttggaagcttgatgatccttgcggtcacagatctccagggaaatcagggatggtaggcacacaggactgtctttccaatggaaaagacacataaactgtttttccagaagctatgattaatagcctggtaatctgtgttatcagtttggccaggctgtatcaagctcctacaaccaggactggaggtggtaatgacccttatataacctgtatagccaggggctcgttccctcaagctcccagctcccatagctaagactagagatatctaatagtctaaatgacccttgcttgagataggatctgtcactggcctggagcttgcaaaaaaggctgggctgcctgactatggaaccatatcgattctcttgtctccacttgtccagaattgggattccaaacacatgccagttctctctctctctctctctctctctctctctctctctctctctctctctctctctctctgtgtgtgtgtgtgtgtgtgtgtgtgtgtgtgtgtagaatttggtgatctcatttaggagtattttgcccaaagagctaaggaagaccccaattagtatttcattttttttaaatttaaaaacaagtttcatttttctttttttatttaaattagaaacaagcttcttttacatgtcaatctcagttccctctccttcccttcttgccctgcccccccccccccgccactgaccacttatcccaatccctttctgctccccagggaggggaggccttccatggggatcttcaaagtctgtcatatcatttggtgcatggcctataccctccccagtgtatctagctgagagagtatccctctatgtggagagggctctcaaaattcatttgtgtactaggggtaaatactgatccactgccagtagcacaataggttttccagacctccaaactgacatcctcattcagggggtctggaacagtcctattctggtttcccagctatcagtctggggtccacgagcaaccccttgttcaggtgagctgtttctgtgggtttctccagcctggtcttgacccctttgctcgtcactcctccctctctgcaactggatgtcagagttcagctcaatgtttagctgtgggtggctgtgtctgcttccatcatctactggaagaaggaactaggatggcatataaagtagtaatcaatctcattattggagaagggcttttaaggtagcctctcgactattgcttagattgttagttggggtcaaccttgtagatctctgaacatttccccagtgccagaattctctcttttttttttctttcagatttttttatatgaattagaaacaagattgttttatatgacaatcccagttcccttctccctcccatcctcccctactacctcccccaactaaaacactacctatcatatatcctttctgctccccagggagggtgaggccttccatagggtgtcatcagagtctatcatatcctttgggatagggcctaggcccaccccgagtgtcttggctcagggagtattcctctatgtggaatgggcttccaaagtccacacctatgctagggataagtactgaactactacaggaggtcctgtagatttccgaggtttcctcaatgaaacccatgttcctggagtctggatcagtcccatactagtatcccagctatcagtctggggaccaagagttctccgatgttcaggtcagctgtttctgtgggtttcaccagcctggtctggacccttttgctccttactcatccttctctgcatctggatcgcagttcagttcagtgataagttgtgggtgtcagcttctgcttccaccagctgctggatgagggctatcgggtggcatataagtcagtcatcaatctcattatcaggggagggcatttaaggtagcctctcctctgttgcttagattgttagctcatgtcatctttgtagatctccagacatttccctcgtgccagaattctctttaaacctataatggctccctctattatggtatctctttttttgctctcctctattcttcccctgaattcattctaactctgtctccccttccccatgttccccattagcttaggagatcttgtccattttcccttctctgggggaccatgtaagtctctcttagggtccttcttgttttctagcttctctggcattgtggattgtagggtgctacttctttgctctagatctaaaatccatatatgagtgagtacataccatttttgtcttttttgtgactgtgttacctcactcaggatagtttcttctagttacatccatttgcctgtgaatttcaagattccattgtttttttctgctgagtagtactccattgtgtaaatgtaccacattttctctatccattcttcagttgaggggcatctaggttgcttccagtttctggctattacaaataatgctgctatgaacagatgaccttgttgtatgattgtgcatcttttgggtatatgcctaagagtggaattgctggatcttgtggtagactgattcccattttcctgaggaaccaccatactgatttccaaagtagctgtatgagttggcactcccaccagcagtggaggagtgatcccctttctccacatcctttccagcataaactgtcattggtgttttttattttagccattttgacaggagtaagatggtatctcagagttgttttgatttgcatttccctgatggctaaggatgttgagcactttcttatgtgtctttcagccattttagattcctctattgagaattgtctgtttagttctgtatcccactttttaattggattagttggtgttttggagatagcttcttgagttctttgtgtattttggaaatcagccctctgtcagatgtgggggttggtgaatatgttttcccattctgtgggctggcgttttgtctttttgactgtgtcctttgccttacaaaatcttctcagtttcaggaggtcccattaattaattgttgattttagtgtctgtgctactggtgtaatgttcaggaagcggtctcctgtaccaatttgttcgagggtaccacctactttctcttttaataggctcagtgtggctggatttatgttgaggtctttgatccatttggacttaagttttgtgcatggtgatagatatggatctatctgcagtcttctacatgcccgcatccagttatgccagcaccatttgttgaagatgttttattttttccattgtataattttagcttctttgtcaaaaatcaggtgttcgtagctatgtgagttaatatcagggttttcaattggattccattggtctacctgtctatttttgtgccaatactaaggtgttttcaggactatagctctataatagagcttgaagtcaaggatggtgatgcctccagaagttcctgtattgtacagggttgttctgggtcttttgtttttccatataaagctgaaaattgttctttcaaggtctgtgaagaattgtgctggaattttgatggggattgcattgaatctgtagattgcttttggcaagattgtcattttactatgttgatcctacctatccaagagcatgggagatctttccattttctgatatcttctttaatttctttctttaatgactcaaaattcttacaatacaggtcttttacctttttggttagcattaccctaatgtattttatgctgtttgtggcaattgtaaagggttatgtttctctgatttctttctcagcacatttatcatctgtatatagtagtagggctactgattttttgagttaatcttgtatcctgccactttgctgaaggtgtttatcatctgtaggatttccatggtagagttttttgggtcacttatgtagacatatcatctgcaaatagtgaaagtttgactacttcctttccaatttgtatccccttgatctccttttgttgtcttattgctctagctagaacttcaaggataatattgaagaggtatggaaagagtggacagccttgtcttgtccctgatttttttcctgcagattttctatttgaattagaaacaagattgttttacatgacagtcccagttccctctccctctcctcctctccaaacaccctcccccaactaaaacactacctatcacatatctttctgcttcccagggagggtaaggccttccatagggtgtcatcagagtctatcatatcctttgggatagggcctaggcccaccccgagtgtcttggctcagggagtattcctctatgtggaatgggcttccaaagtccacacctatgctagggataagtactgaactactacaggaggtcctgtagatttccgaggtttcctcaatgaaacccatgttcctggagtctggatcagtcccatgctggtatcccagctatcagtctggggaacaagagttccccgatgttcaggttagcctgatcgggacccctttgctcctcacttattcttctctgcaactggattccagttcagttcagtgattagttgtgggtgtctgcttctcctttcaccagctgctggatgagggctatcgggtggcatataagtcagtcatcaatctcattatcagggagggcatttaaggtagcctctcctctgttgcttagattgttagctggtgtcatctttgtagatctccagacatttccctagtgcctgatttctctgtaaacctaaaatatatccctctattatggtatctccattcttgttatgttctattcttcccctgactcaacctttctgctccctcatgtcctccacacccctcctcttctctccttctcattctcctagctccctcccccttgtccctgattttagaggaatcatgttgagcttctctccatttagtttgatgttggctgttggcttgctgtatattgctttttattatgtttaggtatgttctttttatctctgatctctccaagacctttatcatgaaggggtgttggattctgtcacaggctttttcagcatctagtgagatgatcatgtattttttctatctcagtctgtttatatggtggattacattgatggatttttgtatgttgaaccatctttgcatccctgggatgaagcctacttgatcatggtggatgatttctctgatgtgttttcttggatttgatttgccagtattttattgaatatttttgcatcaatgttcatgagggatattggtctgcagtttcctttattagttgtgtctttgtgtggcttgggtaccaaggttattgaatccttataaaaagagtttggcaatgacccttctgcttctattgtgtggaatactttgaggagaatttctttcaatttctggtagatttctgcactgaagctatctggccttaggtttttttggttgggaaattttactggctgcttctatttcattaggggttataggtctatttaaattgcttatctgttcttgattcaattttggtaagtgaaatctatccagaaaattgtccatttcctttagattttcaaattttgaggaatacagtttttcaaagtatgaccttatgtttctgtggatttcctcagtgttcattgttatgtaccccttttcatttctgattttattaatttgcatgttggctctctgccctttgataagtttggataaaggtttgtatatcttgttgattttctcaaagaactaactcttcattatactgattctttgtattgttttcctagtttctactttattgatttcaatcgaaacaagtttcttttacatgtcaatcacagttccctctctctcctctcctccccttcccccactgctcatcccaacccctttctgctccccagggatggaggccttccatggggaatcttcaaagtctgtcatatcacttggagcagggcctagaccctccccagtgtgtctaggctgagagagtatccctctatgtggagagagctcccaaagtacattcgtatattaggcataaatactgatccactaccagaggccctatgtattgccaagatctccaaactgacatcctcattcagggggtctggaacagtcctatgctagtttcccagctatcagtctgggttccatgagccaccccatattcaggtcagctgtccctgtgggtttctctagtcgggtcctattttggttgggagtcttttgatgactgcttctgtttcattaggggttataggtctatttaaattgattatctgttcttgatttaattttggtaagtgaaatctatcttaacagaactatgtattctcaggagccaacactcagatactcttaaggacaaatgagcaggctttgtctctctcttaagatgaatcttgacttttctacattttttataaaaatatacagtgtattttacaaagaaaaaaccactcctgatcctcgttagtccctaaatagttgttgtgttctcagatgaaaagtatgtaacttttgtctatcagggatagtgagggcttgcctagctcagcaatggtaatagtaatggattggcttgggtgatgggtagtgacagcttcttgaggttgccccagcctctctgactgaagtatttgttgagcaatatcaagaggtatgatcaagaatacctgtccaaataatgtgatgaatcaggaagaactgaaagatctaaatgtggggaatgagaagccaatatttctgtgtagcctgaggattttgttatagtttgtccgtcactattagccttgtatctctgggtagttgattttctgtgttgacttgactgatcacagggtgactaggggaaaggctatttcttgatgttcatgtgagggtgtttccagatgagattagaatttaaatcagtggattaagtagattcccctatcagatatgatatcatggatttcagtgtgtgtgtgtgtgtgtgtgtgtgtgtgtgtgtgtgtgtgtgtgataagtagaacaagaattctttctgttgttttataagtttgcttaagttgtggcatcttatctcatcattgcagctctttggacaggaattcacactatctggctctcaggccttcagatctggattgaatgatgggctgtcctaggtcttcaacttgcagacagcagactgtcatattccttagtttctaaaatcgagtgtttggtgtctcacagtgccatctccttacttttatgggtttatgcttcattttcctggaaaacccagctaatacaactttaaaaatatagcattttgtattatccatcccataagtagattcaggaaatatatattgaatccaaaatatcacagtagaatcaaatagccatgacaagtaagtggtgaattcatagactactggattcacaaggtgctaagaagtgatggattaatatctaccataatatctacatctgtgtcatcttctctgtggctcagaaaacattatggaagaggagtcagaaagaatgcaagagcccaaaagtaagcaggtaggctgtgaaatacagtgtgcagagagtaagaggctatggagtgcttagctctgaatggaacatctacatcccacccctctcctaagaatcagggataatgatggaagatgggtggatagatggtaagaaccagaggtagtggatatctagcatcgaaacagtgttggtcaaaatgatggggccattgcctgaatgaactcatagcagtcatgactgcaagcacaaggcctgaacacaacaccaagccattccaaattccagcatggataagggacgagctcatgaagtctcacacctaactgaggacttattgagaaagtgtcatttttaagaagtatagagcctgtatttatcttatcttgttatttcttagcttccatattaaattcattgactttattgaaaactagtcttctaaatccatgctcccatctttgccaatttaatatttatgtgaccatagactagtcccttaacttctttgagtctcagtcttcttatcactaaaatgtaaaacttaacagtccttaactcttgggatttaatgaggattaaatgtgttcctctgtagaattctcagaacagtacctggttcatagtaaagtaagacattaacagccatttttatcttactaagagctgccaactgttgtatttgcctggagtctgttgattatgttggttaacactgtgttttcctccctttgaaagctacctaatagtcaccagggtatccctctggagcagtctcttgctttctgcccttacgagtccatctcaaatttacatcaccacagtgtgcttcaatattgactactttgaaatctgtgtctgagcatttacctttgttcctctctgaaccattcttcaccctggctctacagagacatttccaaacaggaccatattgaaagaaaatatatttccagggaactcagtttgcaactccatcttttaacttgtagtctatgaaaacataaattttgaatttttttgtttaaatatccccattcctgctcagttcattctgaattagggtcaagactttaaatatgatctctaaatgtatttactgtctagactctaactctcaactgttacatcactggcttgtacattgtgctaaacccatagatttctgagtcctcctctgttgcaagtgccttcccatagggcttttacacaagttctttctgctgttgagctctttctctcagctggtgttgctttttgctttgtcaatggccagctgtgcaaacactgcttcttcagggccactctctctgaactctaacacctgttttttgaccactctgttgacactcagtgctttctttcacagtacttgcaggaactgcagtgaaatatttcagaattgtttcttaactgtgtttaacatctgtccccctgccagactcaaggcaggtatgtctttcatattcactattgtattcctatcacacaatgcaaaaagtctgtgatctaaaagtttgccaaatatttgctgaaagaaaccccagaccattaagccaactgacaataagtaacaaaaactgatagataatctcattggagaaatgttaaaagttttacagtaataagatgggaaaaataaatagttgaagtgacttggcctaggagaaagttgacttaagcatagagtttagtccaagtagcccaagcattaagcatggtgcagtcatccacccagaatttccttatgatcaagacaatccacactcttttgtctcatttctcttcatgcttctaagtaagtgcatgggattcgggctgttttcttgacttgctgaacgtgagtataagcatcaagatatttggtaagacccagttccctaaaggcttgggatctggagcaaaggtacagtgggagcatttataggacttctctccataaaagtataaactaactgaagaaactgttaaacaaggcctagtccactctcctattttgacaaagtagctttggtgatgagctaaaaggtagactttagcttagaatttgatctccacaccaggacagtgcagggcagtggtggtgagagctcacccctgccttccctgctcatgttcaatagacacattgtgcctctccagcctccgccactttgagttgcatttcaaggagcttcctgtgcaaatgttggacactccagatgacatatccaaggagtgttggctgtcactgagaccagggctacacacacataggaaactgccagtgggtatggctcatgcaagtcttggacttgagttcagtgtcatttgaatagagaattctaaaaccaaatgaagacaccacaagaaggaactacattccaatgcatattatgaatatagacacataaaagattcagcagcatacttgcaagctaaacttatcaacccattgaaaggattaaataggaatggagataaggctgaggaattaagaggtcatgtttctcttccagagcactagagtttggttcccatcacccaaattgggttgtcatgaccccctgcatttctagcttcaggtcaactaaaagcttcttttggcctcctcagatattcacaagcatgttcacatatacatacaatggtaaacacccacacacagacacacaaactacaataggatactggtatcatagtatcagacttagcactttcagttattagctatatataatatctgtaagcttgaatgcattgaaaactagttaaaacaataatttgtatgttttcttattgcagttatttatatatgaatcatctgtggcctgaaggaaacttcctgaactttgttttgtcttcaggataaaaggtagtcattgttagtcttcttgaaggtcatgaagagcaagtttcaagagacctaaattattctgggaaatatttatttcatggtaaacatttcttcttgcaggaattgggtctattcctttacaatgtaagtccagtcccatatgaatagagaattctaaagccaaaatgaagacatcataaagaggagccattgtgctggattaattggaaaatctaaaagaaatggataattttctcgacagataccagttaacaaagttaagtcaagatcagataaacaatttaattagacccataatctctagtaaaatacaagcagaaactaaaagtttccttaacaacaacaacaaaaaagctcagggctacatagttttatcacagaattctatcagactttcaaagaagagaaaattatctatatttatcacttttcacaaaactcaagtccagatggattaaagacttcaacataaaaccagataacactgaacctgatagaagggaaaatgaggaatttgaacacactagcacaggagaccactttataaacggaaaactaatagagcaggcactaagatcaacagttaataaacaggacttcataaaactgaaaaacttataaaggaacttctggaggcatcaccatccctgacttcaagttgtattatagagccatagtcctgaaaacagcttggtattggcacaaaaatagagagatagatcaatggaatcaaattgaaaaccctgatattaaccgacacacctatgaacacctgatttttgacaaagaagctaaagttatacaatggaaaaaagaaaacatcttcaacaaatggtgttggcataactggatgctggcatgtagaagattgcagttatatccatatctatcaccatgcacaaaacttaagtccaaatggatcaaagacctcaacataaattcagccacactgaacctcctagaagaaccctcgaacaaattggtacaggagaccactttctgaacataataccagtagcacaaacattgagatcgacaattaataaatgggacctcctgaaactgagaagcttctgtaaggcaaaggacacagtcaacaagacaaaacggcagccacagaatgggaaaaggtattcaccaacccccacatctgacagagggaggatcatcaaaatatacaatgaactcaagaagctagccaccaaaacaccaaacaatgcaattaaaagttggagtgcagaactaaatagagaattctcaacataagaatctaaaatggctgaaagacacttgagaaagtgctcaacattcttagccatcagggaaatacaactcaaaaccactctgagataccatcttactcctgtcagaatggctaaaatcagtaacaccaatgacagtttggggatcactcttccactgctggtgggagtgccaactcatacagctactttggaaatcagtatggtggtttctcaggaaaatgggaatcagtctaccacaagatccagcaattccactcttaggcttatacctaaaagatgcacattcatacaacaaggacatatgttcaactatgttcacagcagcattatttgtaatagccagaacctggaagcaacctagatgcccctcaattgaagaatggatagagaaaatgtggtatatttatacaagggagtactcctcagctgaaaaaaacaatggaatcttgaaattcacaggcaaattaatggaactagaaaaaaccattctaagtgagataacccagtcacaaaaagacaaacatggtatgcactcactcatatatggattttacacatagatcaaaggattatcaacctacagtctaaaccaccagagaaactaggaaacaaggaggactctaagagacatacatggtcccctagaagaatgggaaaaggacaatatctcctgagcaaattgggagcatggggagaggggagaaggaggtaagagaatgagaaggggagaagaggaggggtaaggaggacatgggggagcaggaaggttgagttgggggtggaatagaggagagcaagataagagatatcataatagagggagccattataggtttaaagagaaatcaggcaccagggtaatgtccagagatctacaaggatgacaccaactaataatctaagcaacagtggagaggctaccttaaatgccctctcctaataatgagattgatgactaacttgtatgtcatcctagatccttcatccagcagctgatggaagtagaagcagacacccatagcttaacactgaactgaactggaacccagttgcagagaaagagtgatgagcaaaggggtgaagaccaggatggtgaaacacacagaaacagctgatctgaacaaggtggagctcttggtccccagactgatagctgggaaaccagcatggaactaactgatccagaccccaagaatgtaggtttcagtgaggaaaccttggaaatctatggggcctctggtagttgatcagtacttatccttagtataggaatggactttgggagcccattccacatagagggatactccctcagcctagacacacaggggagggcctagcctggattccaaagggtatgacagactcttaagacttcccatggaaggcctcaccctccctggggagcagaaatggtatgggacaagaagggtgttagtggggggcaggggaggaggggagggagaggcaactgggattgacaggtaaaacaatcttgtttctaatttaaaataaaaaatggagaaaaaagaaatgttcaacatccttaaccatcagtgaaatagaaaacaaaactactttgagattccatcttccacctgtcagaatggctaagatcaataatacaagtgacagctcattctgaggaggatgtggaacaaggggaatactcctccatgactggtgggaatgcaaacagccaccaaccatatggaggttcctctggaaagtttaactctgtctgtctcaagatccactatactactcttgggcatatacgcaaagtgctctccatcctacacaaggactcttgctcaactatgttcattgtggttttatatttggaaagcttcagcctttaccctattataaagggccagtgcatgaatccccaccatagagcataaatctgcaattcctcaaatgttagcttagattccaaggttgaaatgatggcaatattgacaaaagaactactgaaaaggcaggtcattgtccagggcagccagcctagttaacacagcccactcagaatgaagaatgggaaggttgctaacattgccttggagtgactgacagtaaccatgtcaacagactccaagtttccacacctgaacttctgttacagaatgatttggttcaggagagcttctatgtctgcctgcctgcctgtctgccttccttccttccttttcttcctcccccctcttcctcttacttccttctttccttcctttcttgagaccacaacccaagagactcacttgagcccctcctcttccttctaaggggtcatgttggcacactgaaaacacacccaaagcccattacttcaagtctattttcagaacaagatgccagtatttcccccctttttgtctaaataagagggtttttaacctgatacaaaaatgatatacaatgataacaaatatcaagtatatccaggacaaagaaaggtaaacacacacacgaattcataactataaccagaaagagcaacattaagcaataaacacatattacatgtccaggccaagagtaaggcatataacagattactccaatagctatcctattctggaaaatcaatgtcttgtacctaatatgctctagctaagataagagaggatattagctgtgactacttagtcttcaacctcaaagacccaaggaggagaataacattactaaggtaagcaggaagtgcaagctggcgacttcctaaaggtgcaagaaattacataaacagttggctacctggacagtcacccaaggtctcacagtaaccttggggcaactaactttggctaaggcctagagtatctgacagactattatcagaagcaggaaaattagactgtcctgccctgacctggcaaggttcagtagtctctttttgtttatatactgcttttccagttaggatagtgtgtccaatatcagtggtcgttcctctttcttttttgcatgaacctgtgtgtacacatgtttgtggaggccagagattgatgtatggtttcttcctttattgatttccacatttactgatgcagggtcttttgctggctagtctagttagctaccttgtccagaggatcctttgtctctgcttccaaaacactgggatggaattaggaccaccattcctcctcctccttaattgaaaggtgtttgggaccagttccagtttggctctgaaacttccttatctactgatccatttgcccaacccctggcagaggatttttgttgttttgtttgttttgagatagggtttctctgtgtagctctggctgtcctggaacttgctctttagaccaggctgtccttgaattcagagatctgcctgcctctacttcctgagtgctgggattaaaggtatacactaccaatggctagctgtgggggaggatcttaataggcagtctgttcacacatctggactccctctgcttctagtgggcttcagtctccatcaactctcttccaagcaaactcataggtcatatttctgcatacaacaaggactagttttcaataggcaagtattaaaaacaagactggtaatttgtctcagttcccattttcctgctaatttagcctaaaatgtaaaaactcaattagcttgatttagaggcataatactacatacaataaaacattttatttataggttgtggttacattaaagcttaaaaactgatagattatttccaaaggtatcacaaaagggttgtagtatattaaaataaaattaaaacatgcaagtatataaatagcaaaggcaggtcatgtcatattcttagacttcatgttgccatggcgagtcagggttgaaaggatggatgaaaaggtctttgaagggaataattcctcatactatgaaaatgtgttgaattattcctcatcctacaaaaaggttttaactgtggaaaaaattcaacaactgacatttattatttttttatttatttttcaagaattttttctttcattattgggtcatttttaccttgttttattttttaatagagtaacagtaatagcaatattgattcctcaatatatctcaacatttttttttgtttttcaagacagggtttctctgtgtagctttggagcctatcctggcactcgctctggagaccaggctggcctcgaactcacagagatccacctgcctctgcttcccaagttctgggattaaaggtgtgcgccactaacgcccggctatatctcaacactttaaattttttttacacaacaaacatatatgttgatgattgtgaccaagggaggggaataacatgatcaaaatatatttacatttaaaataacaaaaacccaaaatgtataaaaataaaaatttaaattggggagggctaacaacagatcttcactttcctttccttcaagtccaatccccagtctcatgctcatcttggtagcagactacttactgtggcctctcctcattctaccaccattcccagggtgactaagcagacactagggggacacttggctttcattcctcctatggacaccctcagccctgtgtctcttcccattcccattctaagtgtcaactcccaacctagaaatgcattcttcttggaacacctagtagccatacttggcaggatcccagaattccctaccaagcaaaacacagccatcacagatagggaattgagacaattgatgttaagagttatcaatgaacagtgtttgttgttaattcctattattttgttgttgtgatatatggtttttttgtgccctgggattatttattccttgtggtttcttgggtgtggctaacctctttgagttgaagttttcaatggtaaaaatggcaattctgccagaagcaatctacagattcaatgcattatacaatccctatcaaaattccaacacaattcttcccagatccttgaagaactttaatcttcctatggaaacacagaaaaacccagtataactacaacataataaagataaagaataataaaagtacttattccatatttaaggttgtactaaaaaactatagtaataaaaacagtgtgctattggcataaaaacagtcatgttaatctatggaatcaaattgatgacccagacataagtcaatacatctatggacacctgattttttttattttatttttaaagttattttttatgttataatcccagttcctcttctcacctcttcttccactctcccttctttcccccatcccatcttctatctgttcctcagacagggtaaggcctcccctgggatgtcaactaagtctgtcccattacctcattgaggtaggaccaagcactcccacatctctctctagagaatgggctccacaaagtcattaatatggacacatggtttttgataaagaagccagaaatacacacttgaaaaaatacaacattttaaacaaatggtgctggtcaaactggatgtcttcatgcagaagactgcaaaaaggttcatgcttaccactctgcacaaaactcaactccaaatagatcaaagaaagacctcaacataaaactgatataaccaatctaatagaagagcagtgggcaagagccttgaactcattggcacaggaaaagactttctgaacaggacaccattagcacaggcactaagatcaacaattaattcatgggacctcatgaaactgagacacttctgcatggcaaagggcaccatcattctggcaaaatgcaaaatggcagcctacagaattgaacaagatttttataaactatacatctcatacaggactaatatccaaaatatataaaggactcaataaagtagatttcaagaaaacaagtaagtccaattaaaaatggggtactgatctaaactgaattctcaatagaggaaactcaaatggggcattcttaagaaatgttcaatatccttaaccataagagaaatgcataaactgctttgacattccatcttatacctgttagaatggctaagatcaataaaacaagtgacaactcatgctagtgagaatgtggagtaaggggaacactcattcactgcttgtgggagtgtaaacttatatggccactatggaaatcagtgtagtgtttcctcaggaagatgggaatagatctacctcaagatctagctataccaaagaatttggtttattgctgctctattcataatagccagaaattggaaacagcctcaatagaagaatgaataaagaaaatgtgatacatttgcacagtgggacattactcagttattgaaaaatgaaatcatgaaattcacagttaaatggaactaaaaaataccttatcatcctgactatccagacccagaaaaacaaatattatgtatttacttatatgtgggtactagctgttaactcaatgataaacaaactataatccgtagaatcgcagtggttaggtatagagaaaggaactggaggagcaaatagatttccttaagaaagaaaatagaataggtatggatggacaagggaaagcaattggaattggaggatcaagtgaggaccagaatgaaagaggaatacaggaagagccacctaaaactaaggaccatctaatgggtagtatggaaacccaatacagtagaagcttcctaaaatatatacatttatgaaggtgatctaaatgaaaccaccaaatagcagagccctaagtggacatcacttgcaccaaatgaagcttccactactggggatggacaaaagagtctcatgggaactcccaacaatccaggctgttgccaagactttttgttctccacacattgatatcactatcctgttgctgaagacaatacttccacaactcaatgaacacaaagaagttaggctggtgcctacctagagccttcactcttatgggctagtgttcttggtactggaaggtactctgcacatcaataaagaagaaatgtagatatcaacccatctacaaatgtatcctgcttgcaagatatgctagtataatattggcacaaagcttgtgggagtaacccaccaatatctgattttatttaaggcggaccaagcaaccttgactctgccgagattgctgggctactcccacccccactcagggcagaggggaggagctatttcggcccctgccttggacccaacttttgcctgcccactctggaaactcctgtcctggggactgcaggcagatcgacttgccccctgaggaccaagcaaccacaagtttgctgacattgctgtgctagtcctgctctcacccacctggagagggagtgtttcagacctgtctacacccaccgtgagacccataagagtattggaccctcttgcacgccccccccccaagagaaccttggacctgtacacaccaggataggaagagacaccacttgcacccactgaaagaagatatgggaagacaacaatataagaacacattcaacaccagaaaaaccaatatgatgccaccagagtctagggacactacaccagcaagaccgcaagacctgaacatcccaatacagatgaagcagaagagaatgaccttaaaaacaacttcatgaagatgatagagatcctaagagaggaaaggagaaaatccttcaaagaaatggaagaaaagacaaactaaaaattgcaagaaacaattcaaacagtgcaaggtttgaaagccaagacccacagtctgagggaattctggaattagaaaagatgggtaaatgatcaggaactacaaatgcaagcataaccaacagaatacaagaggtggaagagaaaatctcaggcgatggagatacactaggagaaatagattcattgaccaaagaaaatcttaagtccaacaaatccctaacacaaaatatccaggaaatatgggatactgtgaaaaggccaaacctaagaataataggtatagaagaaggtgaagaaacccaactaaaaggtgcagaaaacatattcaacaaaatcataggaaaaaaaaaaaacctttcccaacctaaagacagacattccattgaaagcacaagaagcctacagaacaccaaatagagtggaccacaaaaaagtccccttgtcacataataatttaaacaccaaacatacagaataaagagtattaagagcagcaaaggaaaaaggccaagtaatataaggaaaaaggccaagtaacatataaaggcaaacctatcagaattacacctggattctccatgaaaactctgaaagccagaaggacctggatagatattctaccaacactaagagaccacagatgccaacccagactactatacccagcaaagctttcaattactatagatggagaaaacaaaatattccacaacaaatacagatttaaacaatacatagcctctaatccagccctacagaaagttccagaaggaaaactccaacctaaggaagttaactacattcacaaaaacctaggcaatagataatcccactttaccaaaagcaaaagaaaaagcagaataaatccacacaagattccaacaccaccaaatcaaaaacaaacaaaaattaacattcaatggtcctaaatttccctcattattaatggtcttaactcgcctataaaaagacccaggctaacagaatgggatatgaaaacagaatccatccttctgctgcaaaaaagaaacatacctcaacttcaaagacagacattacctcagagaaaagggttgggagaagattttccaatccaatggactaaagagacaagctgtcctagtatccaacaaattagacttcaaagtaaaataagtcaaaagacatgaagaaagtcatttcatattcatcacaggaaaaatccatcaggaagaagtctcaattctgaacatctattccccaaatacaaaggcacgcacattcctaaaagaaaaattattaaaattcaaatcacaaataagacctcacaagttgtagtgggagtcttcaacaccccactctcaccactagacaggaccaccagacagaaacttaacaaagaaacaaagtaactaacagaagttatgacccaattgggattaacagacatctatagaacattccatccaaacacaaaagaatatcccttcttttcagcaccacatggaaccttctctaaaattgaccacatacttggcaatatagcaaacttcaacagatacaaaaaattggaataacccctgtgtcttatcagaccaccatgctttaaagttagaatccaacaacaacacgaattgcagaaaacctgcaaattcatggaaattgaataatgcacaattgcaccatttctggctcaaggaggaaataaaaaaagaaattaaagatttcctagaactcaatgaaaatgaagtcacaacatacccaaacttatgggacactctgaaagcagtactaagaggaaacttcatagctgtaagtgctcacatgaagaaactggagaatagtcccaccagagaaactcacagcacaactgaaagctctcaaaggaatagaagcaaactcaccgcagagtagtagaagccaggaaataatcaaactgagggcagaaatcaataaagttgaaacaaagaaaacaatacaaggaatcaatgtaacaaagactttgttcttccgaaaaatcaacaagatagacaaacctttatccaaactaaccaaaaggcagagagagaacatgcaaattaacaaaatcagaaatgaaaaggtggacataacaatggacactgagggaatccagagaatcttcaggtcatactttgaaaacctgtactccacaaaattcaaaaatttaaaggaaatggacaattttctggatagatataacttaccaataagcaacttaaacagacctatatcccttaatgaaatagaagcagtcatcaaaattcacccagcaaaaaaagtccagggccagattgcttcagtgcagaaatctaccagaaattcaaagaagagctaataccaaaactccttaaattgtaccacacaataaaagcataaggttcattgccaaactctttttgtgaggctacaattaccttgttacccaagccacacaaagagacaactaagaaagagaactacagaccaatatccccatgaacattgatgcaaaaatactcaacaaaatattggcaaattgaatccaagaacatatcagaaaagtcatccaccatgatcaagaaggcttcatcctcgggatgcagggttgtttttaacatcgaaaatctatcaatgtaatccaccatataaacaaattgaaaaagaaaaaccacatgactatctcactaaatgctaaaaaagcctttgacaaaaatccaacatcccttcatgataaaggtcctggagagatcaggaataacaggaacatacctgaacataataaaaacaatatacagtaaaccaacagccagtaccaaagaaatggagagaaactcaaagcgattcctctaaaatcaggaacaagacaaggctgtccactctctccatatctcttcaatattgtccttgaagttctagctagagcaataagacaacaagaggagatcaaggggatacaaattggaaaggaagaggtcaaactttcactgtttgcagatgatatggtagtttacataactgacccgataaactctaccagggaactcctacagctgataaacaccttcagcaaagtggcaggatacaagattaagtaaaaaaaatcagtagccctactatatacagatgataaacgggctgagaaagaaatcagagaatcaccatcctttaccatagccacaaacaacataaaatatattaggggtaacactaaccaaacaagtgaaagattgtatagcaagaactttaaagaaagaaattaaagaaaatatcagaaaatggaaagctctctcatgctcttggataggtaggatcaccatagtaaaatgacagtctttccaaaagcaacatacagattcaatgcaatttccatcaaaataatggcacaattcttcacagaccttaaaagaacaatactcaattttatatggagaaacaaaagacccaggatagccaaaacaaccctgtacaatagaggaacttctggaggcatctccacccctgacttgaagctctattatagagctatagtcctgaaaacagcttggtattggcacaaaaatagacaggtagacaaatggaattgaattgaaaatcctgatattaactcacatagctacgaacacctgatttttgactaagaagctaaaattatacaatggaaaaaagaaaacatcttcaacaaatggtgcttgcataactggatgctgcatgtagaagacttcagattgatccatatctatctccatgcacaaaacttaagtacaaatggatcaaagacctcaacatcaatccagccacactgaacctcttagaagagaaagtgggaagtatccttgaacgaattggtacaggacaccacttcctgaaatgacaccagtagcacagacactcagatcgacagtttataaatgagacctcctgaaactgagaagcttttgtaaggcaaaggacacagtcagtaagacaaaatggcagcacacagaatgggaaaagatcttcaccaatcccacatctgacagagggctgatctccaaaatatataatgaactcaagaagctagtttccaaaacaccaaataatccaattcaaaagtgggttacaaaactaaatagagaactctcaatagaggaatctaaaatggctgaaagacacacaagtaagtgctcaacatccttagccatcagggaaatgcaaatcaaaacaactgtgagataccatcttagtcatgtcagaatgattaaaatcaaagacaccaatgacaggttatggtgtagaggatgtggagaaagatgaacactcctccactgctggtgggagtgccaactggtccagccactttggaaattagtatggtgattcctcaggaaaatgagaattagtctaccacaagatccagcaattccactcttaggcctataaccaatagatgcacattcatacaaaaggacatctgttcaactatgttcatagcagcatcatttgtaatatctagaacctggaagcaacctagatgcccctcaattgaagactggatagagaaaatgtatatttacacaatagagtactactcagtggaaaaaaaggaatcttgaaattcgcaggcaaatggatggaactggaagaaaccattctaagggaggtaacccagttacaaaaagacatacatggtatgtgctcactcatatgaattttaagcatagagtaaaggattagcagtctgcaatccacaccaccagagaagctagaaacaaggaggactctaagagagacctacatagacccctagagaaggggaaagggacaacatctcctgagcaaattgggagcatggggggaggtgagagggagctaggagaaagagaaggggagaagaggaggagagaggaggacatgagggagcaggtttcgttgggggaagaatagaggagagcaagataagagatatcatagcagagggagccattataggtttaaagagaaatcaggcaccagggtaatgtccagagatgtacaaggatgacaccaactagcaatctaagcaacagtggagaggccaccttaaatgccctctcctgataatgagattgatgactaacttggatgtcatccagcagctgatggaagtagaagcagacacccacagctaaacttgaactgaagtggaatccagttgcagacagagaggagtgatgagtaatagggtctagaccaggctggtgaaacccacagaaacagttgacctgagcaagggggagctcatggaccccagactgatagctgagaagccagcataggactgatccagaccccatgaacatgggtgtcagtgaggaggcttcggaaatctatggggcctctggtagtagatccgtacttatccctagcataggaatggactttgggagcccattccacttttaggtattctctctcagcttagacacacagggagggtctaggccctgctgcaaatggtatgacagactctgaagactcccaatggaaggccttaccttccctggggatcagaaatggtatgggataggtagggtgttacttaagggcaggggaggagggagagggagagtgaactaggattgacatgtaaaacaatcttgtttctaatttaaataaaaatggaaaaaatattccttgatgcattgtctctgactctccccccctctgccccctctctctctctgtgtgtgtgtacaggtggggaatgtttattgaagcatgggcaacccaccactaacttcaccacagaagacaagaactctatttcaccattaactgcaagaagttactctggaattggtggagcctcctgaggctcctcctccctcttggctcaagaatattattgaaagttgagtactctctgagctgcagccagctaactttagggctgtaagataggaacagtatggtacataatccatcttttacaagggggagccacatagatatcattttctaaagacttatagaaggaaggaaggaaaacagcactcaaaggggtcttgggtatatttgacaacaattcagtggtaaatttatttattgatcatttatttttcagatccaccttaagcttaagacattttatctttttgtgaaaagatatgaagagaatgttccaaattcataaattcagaacttttcaatccctcctcctattacagacaattgttttggattcatatgctcaggttcaaacactgtaagggaaaatgttactatcaaggaaagacatccaagaatgaagagaggatggtaagcctgggaccttattgtagccttcatcatgttgtacagtgactctgtatgactcatttccattgagtacttggttgaggtaagtatagggtcttccccaaacaaatagtaaatgtaatggataatttttgctttggtcataaactgtgaatgtttgcacattaaatattggcccttgtaggagtccttacccagttgtctctgaagtgggcatagttacaaaaagtacagagtttctgctgtaccaggaaccagtattcagcaggaggggacatttgtagttcattcacaaaagaagggcttctaaaggaaaaataaaacaatgaaaacaggagttagaaagcaatgcagaggcctaaaggtcactatccctggggtttaattccagcttcaacacaacagttcagtgatttggtggccttggtgtaaaaacttaatagattcaacagtttactaaaaagctatagctttttatagctttaagatggctgcattattcttgttcaacagcctgagacctgctcaaaatcctccattgagggctaataagtttatggatacagaaattattctcagttaagaaaatctcttccagaaaatcctgtgttggagtaactggctgaagagaagatgttcctaaatctctccaagttgaattaacaggttaccaggagctaatgaagtctgattacttttatttaaagatttcatttgattattattctctctctctctctctctctctctctctctctctctctctgtgtgtgtgtgtgtgtgtgtgtgtgtgtgtgcacaagtatagtgcccacacagattctgcaagagggtggcagattcccctgaagctggagctaagggtttgttgtgaactgatatatgtaggtgctaagaaacaaattcaggtcctctgtaagagcagacaatgctgttaaccactgaaccatccctccacctccttgatatcattgatatcattcagattgatatctgatattgatatcattcagaatgtcagtgagtcaccttggaatatgacttccacacactcattaaccagtacagtgcttaaagcatagctaagaaaagagtactcgggaggcagaggcaggcagatctctgtgagttcgaggccagcctggtctccatagcgagtgctaggataggctccaaagctacacagagaaaccctgtcttgaaaaacaaaacagaaaaagaaaaagaaaaagagtgttttcaggtcattttgctaaacttaaacatcggattttctggctatataaatctggaaaatcatttaacatgtttatgtttaaatttctgccattaagttggcgtggcgttcatgctatacacagagttgatgagaggattcaagcaccctgggctctcagatgttgtgagtggtacagtggttattgtcatcagcatggactgagtcatattcttaccaaaatgctgacgccatacacaatctatgttcagcaaattttctaatctttttgtcttatttaattcctaattacttctggaattataaagttactgtttaaaccagttggctgttttttgtttttaaagcatcaccttctatgtcatttattactgagttgttttcaaacttagaaggtagaattaattttttatttgactttctgaattctaatcttctaataacccagagtttcagtctcctttctccctccctccctccctccttccctccctccctctctctctcccccaccccacccccccacccacccctgtcttgcagtactggggattcatctcagggccttctgattgctaggtaagtactctataccattgagctctatccttagccctctttttatattgagatgttctcacctagtttttatgggtggccttgaacttacttagtagggttaggatggtcttgaacttaacagtctgttttccttatcctcctgagtatctggttttacatgactaccatgagacccagctagcatcttttggattcttcagaaggtcaaagccaatctgtgtacataataaatttccatagatactgtgtgtcagtattgatgtgatgcttttaaccttgcaacacatcattcatctcagggagtagaaaggatgaacagtcaaaacccacccatgactttgtatcttttgtcactttcttggcctaaattttggcctctggtagggcctgcaatagaggttaagatggattgacatgctgtagacacacagctaaataagaagtcatgaatttcaaggtttgtagacaagcaatgatacattttagccaaaagttgttgaatttaatcaaggagctgaagtgtgtttcatactgacctgggaatcacacactctagttgaagctcagcagaagcacataaattcctgggtttataggtgagccaggtattaaagatcgttctgtcaggtactatctgttgagaaagagatctttgaagtatacaaatggattgtcacaacacattttaatatattcaaataacaaatagaaagataaatcatttgccattctactaccccaagaaataaatatatgccactgaattaatgtgcttaaagttctgtcagcaatacagaagcactcaaacagaaaataaggtaatacacttgacatacaatttgtgaatgagattgccaggaggctagtacattaactctgaagctttccaactagctttttcaaatcaaagttctaggaagtatttctttcttacttagatgacaacttgctctatgaggatttaaaagatgaagaaactatttgaaggagtctgagagattcttcctgatacttctgacttcacaatatttggcttttactttgaatttgaatttccagtttctgaaagctcatgagaaggaagagtgttagctaaaaatgatgtatttatactgtccaattggatttcctgagcattaaatgcatatacatttcttaaataagtttcaaatcctatggttttaccatactgacttcaagttctgtaataatttgatactccattatttatgcttttaggatcatattaggtatgatgtattattccagttgatagagtggttccaaagtcagtaacttgttgaataaatagttggatggttcccaaggtctgaaagatttatttcatccagttttcaaatccagaggtcagacagacagacactattaaaactatgaaatggccttatgatgactggcagagtttaggctgtatcagtggtagaggaagtctgcccagagcaaagggtaaggagagaagacaggtatgggtattttatctagggtttctcagcagtgacacttggctttagattaggtagctctctgttatgtatggaggggcctgtgcctgcaagcactaaacacctgctccccttcacaagatatcagttgccccttctcctttctggatggagttataaatattgtttcctcagattgcgcaatgcctccccccttcatggagaggatcgttcccccttgataaatgggcttacacttccgtgaagggctctatatttgacacttgcttttagctgctaaaacctcaagatgcctttgaatttcttgtgatgggtgtatgggaacaaatctgagtgtctggcattttgctgtgggtaggcataggcttgagaaatagagtgagatagatacccattgtatgaaactatgaggcagagaagattgaaggattgaagattaagttggcatgattaagttcatgttaatctgtttttccatgttcatgccagtaggttcttagaagaacatacttatttcgatgactacagctatgcaaattaagacaagataaatgtaatgttttgtattaccttggatatgcttgaaaattcccacaccaaagtctactttcagttttcctcataaatgctaaagtactattgatttcaatgttacatacatacatatatactaattagaagtgaacaaattaagtctacttctagttcatgaccattgcagatcattcttaacttactgggaaagttttgatcaaaagactatacctctgtgtttactcatttggatgctgagccactattattttaaggcctgggctctgagcaccacactaaggaggaggatatcacaggttacccccaggtagtgatgtgatggatgtgattagtttagtgatggagatagatctgtaagtcaaagagaaaagaatacttcactagggatatcttgtttgggttttagtataataattattgttgttcatttcattctgctcatcccagagtcattatagcatcaggcttagactagagacatcagcaagccttttctctgacccttgctttgctatatgcaaacttcatgtctggttacatggctagcttttatgcatcaattcatcacttgattggaagcataattgatcctgtaggattaggtgtgtaaaatgcccattgaaattaaaatgcatgccatgctaatagaacattaattttgatagcaaaatctatagtttccttattaatgccgagtatcctatacgtaataaatctggtgaatgaatagaaatgacagaagcattcttcgtgtttttcttaggctaaggcactaggttgacaataccagtgttacacatatattaaggcaagaacaggaaacaacactttacagatggcaccggtaaaacggctccttctcttacctctataacaatcccacaaagcctgacagaataataaaattcaaattcatctggtcggatgaaagtcaccacacagcccgtccctaggaataattcattagggtgcacaagttcatctggataaaacagtgcccttttagctataacacggagcataagataactgcattccactgatactgttgaaagagaagaaaaggcagtcagatgctccacctcaatacatgccatgaaagaagatccgatttaaccaaaacaaagagaggttaggaatgtgggcaaggatgattcctttcataatgtgactctactcgtcttttcttcccattgatagccctccaatgaatcaacttgcaaaaccaaaaccgcagaagttctgcctagattaactgtggtggctatttggaatgggagcagaagcatgtgcttttatcagggtgctatatggggtatcttggtgtctctgtgcaacttaagcagagagagagagagagagagagagagagagagagagagagagagagagagagagagagagagagagagagaagagagtcttgcgtctggcatatgtacacatggagccagcggtaggtggtgtgtatctttcacagttgctctccaccttatttttaagacaggttttcccactcaacctggaaccttcaaactctgctggagtagctggccaacaaccctggcaatctgtctgtctctccctccacagcactgggatcatggctttttctatgggtgctggagatctgagcgcagatcttcatactcccatggaaaacattttactgattgaaccatctccacggcccataggttttcatttttagtccatggccatgtgccaaatagtagcagacatagttcttatgggagaggagatgcgagtctttcaaggtccaagaattaataaagggctaggacggaacactgtgctctttggagccactacactgcattaccctggagatcagaatgttcacttcatgcctttgctggacttatctcccaagttttcggatcagatctctccttagctatcagatatacagaggatatttgaagcaatcctcctcagcatgcatatgttctatatggaactcacggttcttacttaacttccatttgtgtttcctcatcgaagtcaacagcacctcacccacccaccactgaagcccaaaggccttgggatctagttccagttcccacttcccttccttcccccagtcttccactgagtcttttttcacttttgctttcaaaattcatctcccatctactcctgcatggctgtatcctggattccatcactgtcccttccctgggcaacctcgacagcctccccgaggagctcactgcccccaatctcatttatttcatttgttgcagctgccctgtgtgttgatggaagggtcctcctccctttcccgccatctcagaaacctccactttcctgtctaacctttcaagttacattttttttccaattaaaaatggtttagtttatcttggtcatagttcatcagcttagagtatcacatttgcagtaggcattttgtacaactctcctgttatctaaagaaaagaatagggagtgttgccttctctctaagacctcaccttcctggaagcagggacagtattattccctaagtcccatggtaactgtgctgcctccatgaatttcccattgtcctccaaatactacacaccttattcttagtacccccactcataatcggcttttcttctgagacatagcactttctatgacaaactcttaagttaacctctgccttctctgagctgagtctctggtggtctgcaggacttggggtattttaaatgagttctgtcccactttctcttagggaacatgataccatgctggtggtgaaacaaggttcctcagttgtttgggaaactgttagccctcctgcgatctgggagcagcttggggtcagtctgtatgggcctttaaaggcccatgtcaatgtgtcatgagttggctgtagggagatactggaatgttcaagaaagttttcttcagaatatcttaagaagaattgtataatgatgtagggagggcaagagagatgattaaacaagggaagctagttaagaatgggtagttgagccggccgttggtggcacacgcctttaatcccagcactcgggaggcagaggcaggcagatctctgtgagttcgaggccagcctggtctccagagcgagtgccaggataggctccaaagctacacagagaaaccctgtctcgaaaaaccaaaaaaaaaaaaaaaaaaaaaaagaaaccggtagttgaataatgcaggtagcaggtaggaaactgtgaaaagacagagaaggtacaagcagaggcaggggaatcatgcagaagaacagatggctcaagggtgacctggtaggaaatggacgagtgcctgtgtaggaggaagtgggaagagaggaggggaatccaactctgagacctctgcaaaagtagcaacttgaatccagaacaccttcactcatggagacagggaagacacactttgcaacctgtatgccaggactataatgttatcccaggtggagataacctatagggctaggaattgttaagttgttaacttcagatggtacaacgaagtccctgaaaccaaaagcctcataactcatggtcattgagtaactacccagtgaaaacattaccagaaacagtccactctgatacctggctgttgccccaaacacctccatatccaagctatgagcagcagcagcaatcctgatgaaacgaaagccttcattatgctggaccttgagctaggacctcctctgatatgaggtagttgagaggacctgggaagccagaagtgtttttatgtccgagctcatactcagatggattcaatgaacccaattcagagaggagaaaaaaacaaaccaaaaaacctttaacatgtcatcaactcaaactcctgagcctttctatcagatgggttagaaaaatattgtattggctaagtgaatatagagacatattatgtggtacttttgaactgtctgtataggacctcaaaattcttgatcacgtggccaatttgctggctgttttttggtactctatgagttgatttagggatgccactgactctgacacaatgacgtactttgtcatctgtagttgaaaccatctcccaaagtttgtgatacacattttgtttaactagttaattcattagttagtcaattccctggtggcatttggagctgacttagcagaggttactcaccattagccaccaggaaggagaggttaacagagaccccaatcttgaccattcctagaccaaccttgagagaacccaatgctttgcagtgatttcacaatgtccttgctagcgtgacatgtctaagcctttaatctctcattctggaccaccagagagattctgatgttccaggcaccatgggatatcctgggagagtggtgtggaattcctgcagggtctgtttattatgaaggctttcaaatttcctatgaaatacatgccttacttttccattgctgtgacaaaacacatgatcaaagcaacttataaaataaagcatttatttggggctcactgtttcagagacgaagagctcatgaccatcttggtagtggggagcttggcagcagacaggtaaatatggtgctggagcagtagcttggagctcatgtcatgatatacaactatgaggcagagagagagagagagagagagagagagagagagagagagagagagagaactcagaatggtctgttgaaatcacagagcctgcccctagtgaccacacctcctccaataaggacaaacctcttaatccttctcagacagttccaccaattggggaccaagcattcaaatgtatgagcctataggggccattctcattcaaatcaccagaccaaaaaatcttaaattttcttcaggtatgtcaataaagatgtttattaccttcaccagtagcatgtttttctacactagtatttattgtgtaagttcaggatgctagtgttacattttttgatataaccaacaataaaaagtacatgtagaaaataccctggaaagttattaagagaagtgcttgatgacttatcgcacaaacaatttaatataaatgaaaaggattctgtggcataaaagaggttttgcatatatctagaataaaactgtatttcaaacttgtaacttcctatactatggtgttcagttcttttctacttcagacatagtttgagaggtatcacatagttagacctgaaaatgtcactaatttttcacaataacttaaaagttaaaccgagtatagcaaacctaaaacctgagtatgttgaggcagagaagggacagagtcctgttaaccaggtaattttaagaaatcctatgagccaggtgtggtgacacacacctataatctcagaactcaggaagcagaatcaaactctgtgagtttcaggccagcctagtctacagaaggagctctaccccagccaggactacatagtgagacctggtctcaacctccaaccccaaacaaaacaaaaccaaaaagaaagaaaatccatgaaatgaaacaaattgcaagtacaaaacttgttaaaaacataaacctaagctgggtgtggtggtgaatgcttttaatcccagcactctggaggcagaggcagggcgatctctgtgagtttgaggccagtcttggctacagattgagttctaggacagactccaaagctccaccgagaaaccctatctactatctactatctatctggtaaaaccgagagagagagagagagagagagagagagagagagagagagagagagagagaagagagagatgactcagggtgcaagcccccagatatctaagatgatgaaatctggagatgtaacatacataatggagactatagttgatagcattgtattccatactgaatgattcctaacacacacacacacacacacacacacacacacacacacacacacacagcagcagcggcggctggggggcacacctgtaactacagaaggagagggatttgtccatttatttggcagcaagtataaaaagctcttcaagttgaaatatgtacctgtactacaagttgaaaatatttgagaaattattttttttccagtgctggggactgaacccaggaccttaagatttctaggcaagtgctctgctctactactgagctaactccccaacctttagaaaagggctgggaaagattaattaattaaaaaatataaaactttactttcccctaggttcttatttgtgtagtggaagggctatttgaagatacattttttaataaagaaaaaaaaacctaaattaataaataataatttaaattatataaaaaagaaatcgttgtgtgataaaataagagttacatttctttctactgttacattttttttgttattttgagactgggtttctctgtgtagctttggagcctatcctagcacttgctctgtagaccaggctaccctcgaactcacagagatctgcctgcctctgcctcctgagtgctgggattaaaggcatgtgccacggatgcctagctttactgttacatctttatgtcttattttgcaacagatttgctaagtcctggagatgaaaaaatacatggactatatagctttaagaagttcatggtagagtgaccttatagaactgttatttatttatttattttggtgtgtgtattttgtttgagacagcatctcatgtagtccatgcatagtcactcataacttatgaagtgctgaggttcaaactaagagatttgtgtatgctgggcaactggtctaccagttgagttacgaccctagccctctattaggacagattattagtgcaataatacatttcaggcaagacagtcatgagctgctgcattcacctttcagtacctctgtctttcatgctatatcatcgtggaatgtagttctgaactcaaataattgatgatcctgaaacagaaaagtagggtgagcttgaatatgggttttgtgggtgctgggaatcaaacttctgggcccacaaaaggtgggtaagtttcccaccattaagctatattcccagaactcaaatatgcatttaagctgtttttcataatgagattttttaacttctcactttgaagaattgtcaccttttgtttggaagaaagacatttaaattttgtatacattactttcaggcattactacttgaaatgtaattgtagagaatcattggtatcacttgagagtttattacaactgcagcatcaccgggtctgacccccacttctgtattagaatttgctttttggcaaggtattcaggtgatatatttaagtttgcaaacaagccattccaatgagtatcagtacaacatgctctgtgaaggcaaatctttgcaccccaacaattctgagtgcattagtatcaatgtcacttgggagcttagaatgtgaatttactgtcccactcttgtcttgctgaatcagaaaaaaggatggctgtaattcagccattatgtgttaaaagaatactctgcaggtgaatctgattgagagctgctgcttagaggtggactggagtggaagggagtgaggtctcaaggtgtttgggtctttgcattctgagcaacacaagacaactatattttagacagttactcctttagtgttcagataatgagctccagatgttttgggatggtagggagttttaacaaagtgtaccttagtgtttaagatcactctgtacataatggcacagattgtgatgcgagtcagttttctattccctctgtatcacctgcagagctcccatctcagcaggcatggctgagagctatgtggaagtttcaagtgtgctatgggagcactccagtggcaggttttctatcatgttcactctagttctttaatccctaaagaaagcgttatattttagatgatgaactgatggtgtattagtggcacatgtgtgctgtaaaagatgctagttaattactaccagctgaggatctatgccagcatataagaaggcctttgacttgtcctgtttctcctttcctctgtggggtttaatctccagactgagcaatgaagtctttcccgggcctgcagggattccttctgcttctattctttatgaggacttgtgctgatgattggtcaggtatcacatgtgacttggagaatttgggatgtcttaacatgtgctaggggtgaggcttttagactgtttcatatgtattggtctcttccagatgcatgatcttagaatctcacccttctaccgagactagacactgtcctaacttgagttctttctttctgcagttccccttttcttttgatccttcccagatcacatcacattctgggggttcaatacttgaggtgagttatatatgaggaaattggagtggcctggaaagcacagaggtgttcatgagctgctaagagcttaggactctctgggtatggtggtgcatgcctttatttctaagttcaaggccagcttggtatacaactcaagttccaggacatccaggactaggtagagaaaccgtgtctcaaaaaccaaccaaccaaccaaccaataagtaagtaagtaaataaataaataaggatctcaggatacctgtggcatgtaggaaagggcttagtcttcattggccttatcctttatagagagagccacaggatctgagagggaaggccagcagctccctgtggtaaggtggctaactgatccagtttcttcagtttgagtgccatcaagtctcctactttaagtaaacttgaatggttggtcacctaaatatgagtgcaaactcttagtttgacagtttagaattgcaacaaatgttaggtattttttttaaccaaatttgttcatcaaaataccccagtcttgatgctggggaagttgcaagacttctagtgtgttggttaatgtattttatttctttttattaggagctatataaagaagacagctctaagcaatcacgttagtatccactacctcatcttgtagacttattaaatacatgctgatttgctttccttgcttaagttaggaccagagtgaaatttcagttagaatgggagtccctgtgggagctcagtgccttccttctatccacatggaagcttactaactattcatccctctgcatgtttcataattttactttagctttacggaagcagaggtatggtttacaggcatctaaagttttatttatagttcattctacagcttgactttgctcagtattagagatatttcccctccttccacccctcttggtccctcttcctaccttccctctctcccagatccattcctcctctgtttctctttgaaaaaaaaaagttggcttcccaaggatatgccaccaaatggcataacaagttggttgtagtgctcttgaccagtgtttattgctatatcaacccttccatgtttgctttttttataccatgaggctgtggatgtagaaatgaatacaagggctagtgtagaggagcatgagttgatcaagagtgcagtcatgctctgtacttcacattgtcttataatagaaatatgttcttgtgtcccagctgtataaaatcttgactttgaggctgggcatggtggtgctcacctttaatttcagcacttgggaggcataaccagatctgagttcaaggccagatgggtctacatagagagttccaggccattcagagctatgtaatgagacttgtcctaagaaaaatattgacttctgagaatggaattaaaggattaaagtgttttgaatttgtattgctctctcctatgacagacttgctaaaaatatctttggtagataggagtgtatatgagtatcttagggatgaaataatagcaaatgcccatcttttacagacttgcttctctctacaacatgttttattttgttaagggatgagcacttgcattaactagctctgctcaaatgttctgtgatgattcacatacagcctattaacagaaatattctcctttctatttcttagcctttcgtctgcaatgcaccaatcactggttctatctcaggattaaggccacactatttcccaatatatttatggatcctgacgaagtgtttttaggaattggctgccctgtgtccacttcctggccaaatgatatctacgactttacctaccgtacttactcctgtgggattgtcaataaagtaagaaaaaaagctagtgactatggtcccttccttggacccacaaaatggaaattatagtttctatttgtcatacagctgagttcatgtctttgaaagtgacacccagtaaaaatgataacttgcggatgggaagagatctgttttctatatatcacaaaatgggtttcaaaactagtttcacatgacagcccatgacatttggctagcctcaggtggaagggaataacattggtttgacatcacaaaggttctcagagttccctgttgggggcatcggcaggttagttgtgcatattgctttctaacattaactggcattttgaattgattaaaaaagtaaaaatcatggggggtaggtcgggggtggggaggagggatgggggtgaggggagggagagggagaagggatttacatgtgaaacaagcttgttcccaacttgaactaataaaaaaaaataaaaatcagaaactttgctgtagcatcacttattaagagacatcctacaaccttgacaggttgagatgaccgacagatttggtgacacaggaagaaaattttagatggaaccatgcatgcgagatacatagtgtttattcagtgcccttgggagaattattattgtgtgaaaagaactgggctgtggtgaactcagacagctgtgatcctgcagcaggctgtttgcattccagccagataactgattagaactgaaacttcatcagagcggtcttcctttcttgtcctttcctgtctgtccctttccttccctgtcctgtcctctctctctctctctctctctctctctctctctctctctctctctctccacctctccctcctcctcctcctcctcctcctcctcctcctcctcctccaagcaacgacacagagactggggctgtatctatgtatctcagttggtagcatgttcatctagcatgtacaaagctttgtgttttgtccctaacaccacagaaacttggcttggtggagcacacctgtaaccccctagcactggagaggcaggacagaggattaagaattcaaggccatctggctgcctaaagacttcaaggacaacatagactatatgagacccagtctcaaaacaaatgttcagagttaattatttaaatgaaattctcagaaggctgaattcaaaatagtttcagctgatctgaaagctggtgttcccaaaataagcaacacttaccttctacgatatttctggaaaggaggtgtaagcatttgagtttaaaaactaggaatagaagatcttttggagaactcaaaatacctacaagttcttcctcaaatccttgaactctcctgagatctgagataaagattttaaacatttctttgcccctgtaggttcttcatgatgtcactctgcttcagactaaacttacatatatctcaaaaaactctactttacgagctgagatgcctctgtcctgtgttctgcacaggtgagtaccatatgtggggcatctgtacaaggccccagctttcccttgaccctctagataaaagacttaagtcttaaatgttaaattatacaacctagggtgtgtgggtgggtgtggtggtggtgggaaccaaagcctaacaggaatatgaatttctttatccgtggccctgatcttcaaaattacaattgtctcctagagtgttagaatgctggaaaagaggagatgtatccacttttctaatactagtgtcaggatggctggaaacgtcacaggtatcacccagctagtcaaggcaggctgctgtaaaaatagtccacattcaagtttactgaggacagaaagaaaaaaagcctggaagatacagaaatatatcagaaaaatcaaggtcagcaagcagcatgggtgggttgggctgaagacatagggagagggagcagatttaaatctgactcatggggtgagattcatccatcttccttttgtatcttattagttgacccatttgagaaagcccaaggtatatagctcattagcaacattgatcaggtcttagcaaaattatgataagcttggcagggtctacccattatcctccatttccccctttctgcaaatgccctttctatccaaataatacttctacattcatgttctatgtgtatgattcagggtccacatatgagagaataattcaatatttttattttgaaacaaatttattttcccttcaagtaattattgaagccatattacatttcccttcatacaaagagtaatacctaccatagctgctaacattttaatgcaatatttaattaattctttgagaattgcatgcaatgtatttgtaaaatattcatccccactcctaccctatttcctcccacctctctatccattctctaacattgtgttctttttaaattaaaaaacaaaactcattgactccaatgtgtgctgttaatatactcatgggtgtggggtcatccactggagtatgcttgacctaccaggagtcaagcccttaaaaaaatacctgactctgcctccccagatgccatcaactgtctatggttcctcaattaggggtgaaggctcacaaacttcttcctatttcataatgccatatgacttggcttgatcttatgcagctctggttaaggtaaccacaggtactgtgagctcacgagtgcagaggtcctgtcagttttagagacactctgtctggtcttccctgacatttggctcttaccatctttccacaccctttacctttatagtctttatgtgtgtatgacggtggtataaatgactcatttgtggctgatcattctaccgatgcttgttttctgcatttgatcagttgtgagtttctttcttctttttttttattagttcaaattaggaacaagcttgcttctcatgtcaattccttctccctctccttcacctccccccccccccgacagcccccctccccctctgctccccagggaaggtaaggccctccacaggggctccctaaagtccaccacatcatccttggccaggcctaggccctcccctatgtgtccaggctgagagagcatcccttcacgtgggatgggctctcaaagtcccttcttacaccagggaaaaatactgatccactaccaggggccccatagagtgctgaggcctcctcattgacatccatgttcaggggtctggatcagtcccatgctggcctcccagacattagtctggggtccatgttctcccccttgtctaggccagctgtttctgtgggtttcaccagcctggtacccacccctttgatcttcattcctccctctctgcaactgggttccagagttcagtttagtgtatagctgtgggtgtctgcctctgcttccaccagccactggatgagggctcttggatgacatataaaatagtcatcagtctcattataggggaagggcatttagggtatcctctccaccattgcttagattgttagttggtgtcatccttgtagatctgatcagttgtgagtttctatgttaaccactgcccactacaactaagattttaaaatcacatatcataaacctatgttgttgtaagtgattcacgtgaatcagtgcatctactagtcactggaatttggccttgagtacagccttctaaactctaagatctcaatagatctttatccccctgtgatatttctctttttccccccctcacttttagtcggtatcctcttttatgtgaagctgaaattagaggagatttcactggcaatcctcctgaatgggaagtagatatgacaacaaaatctgttcctgaagtgccaacaaagtaaggagacaccaaattaatattttacagcttttgtcagacatgattaaatatgccaagataacagctaagttcatttcccatttgactaaagaacagcttctagatcaggccttcctgtgtttcttaaaattgttagtgatgatagtagtcttgctagtctgttactagtcagagacgccataggaattagagatgcccctcttgggtcctgtgatagctggtcttacttgaagactgcagtctgggagacatgcctctgggtgtatctgtaagggtgtttccagagattaaccgagtggagtagggctagtcctcaaagtgggtggaacctatgttgagacctaccaattggtggtccaaggaagaaggagtgtcacctagatatccttcttcctggaacatatttatagttgtcaccactgtcctctgatgacatcatattctgtctcttcagctattcaacatcaagtgaagaagactatttttaccaggactaccagattcctggaaccagctgtctgaagcctgttgaagtatgtagcttcatgaatcagaagttgttatttctacatttctcaggaatgcagatggttggatgacattttctttcatccatttttttaaaaagtgactaatttgcaattttaaataaaatggcatgctaccttcatatagtttcattttaaaaaagctgtccctgcttttagctgtatcaagtctgattagtgaataaaaatcttccattaatgctgcttctttttttttttttccgagacagggtttctctgtgtagctttggagcctatcctggcactcgatctggagaccaggctggcctcgaactcacagagatccgcctgcctctgcctcctgagtactgggattaaaggcgtgcccggctgcttctgtttttttgaaggactaatatgcatcttattaagaataacactcataattatttttcttaagggtttttacagtgatattttatattttgagagtttcgtgtatgtagacaatgtattttgatcgtgttcagcaccctattcttcctcttagctcctccaagacccatcctccaagttctttaccactttccaacttctcctttaaaaaaaaaaacaccccaaaccagcaagtctaattagtgctgcccacatactaaaggtgtggggccttctattggatcctgattgacattccgggtgctatgcccttaaaacctgattttttttctcccccagaaacgatcagcaggcaatagctcctagttaagggtggaggttccagagccccttccctctccatgctgggatacggactgatttgatattgtagaggttttatgcagctgctgagagtccatgagtacaaaagtcatgtcatgtccagaagacactgtttctgcctggtcctccctgaccactatacacagaagaactagtgactgactgactggtcctgtttgactcacattacttcatctttcctttaccttccctccaattatttccatttgcatgtgtcttaagtggtgtaggaacagtgactagacagtgatgatggagcagaatggtggctggaatctgatatcaaccccttagtagctctatattttggtactcgcatggttcatatgtacattaaagtttaataaaatggaatcaaattcccatcaaatggaaaactcaagtcttttgattgattgttaggataaaccagtggttcacaaccttcctaatgctgtgaccctttaatgcagttcctcatgttgtggtgaccccaaccatacaattattttgttgctaattcttaactgtaattttgctgctgttatgaattgtaatgtaaatatctgtgttctccaatggtcttaggtgacctctgtgaaaaggtcatttgatccccaaagaggttgtgacccacaggttgagatctgctcctacaaatgaagaaaggcatttgttggttcaataaagtcatggcctgagttacacattatatgccatgaacccatgaatcgccaaccaggagttcaggcttattgcagttatgaattaagatttttcatttagaaattttattctaagaatgtaatgggatatttatgctctttttaaaaaaatatgtgcatatgtatctatatgttggtatgcacctatgaaagtgggtgacaacagaagtcagaagatgttggattctctggaaatggattcataggaggctctgagccactggatgacagtattaggagataaccacttcagaatcactaaaatgacaaaaatcaaaacaaataaacaaaccaaggattttttcaaacagaagtggagaaattatgacctttgtctactgctgtggaaatatgaaacagtttagtcaccatggaaaaattcagagggaccactaacagtttgtgaactgtctgatgtctggtgaaataggaaggctgtgtaatggtctatttctgcatttccctctgtactctactcccccaaacaagatccctgaaccaaacgaccctgcttatctctgaatggtggagttcgggcccctggcacccagcagaatcactcagacaagccgatcatatcttcttgtaggatccagggatcacctgtctttttggttctgaaaggattatgtaccatggctcctgttcctgaatgcagcgtgtggctgttttattccctccacctgggctgtgaatgggtttactaatgagctgacaatctagtctctttagctttgggtgttgcagtggggtgaataggagtcaataaaacctaggacatcctgagctacagcatggacatcagcaaaacaaaacattctccccaccccaaaataaacctctcaagccaaccaaacaaccagccccaacacccccaaacagaagccatatcctcccaaagaactgaaaacagttgtattatatagaaagactcagaacactgttcatcaagatggaaaccacaaaaggaagtgttgtactgttatgctacaatgtgaatgaaccttgagaaacatactaaatgtaaggatgcatatatgaaagtcacacactaagtgacccacaataggtagtaggtacatagaaatggaaagatcagagcctgcatggcattgagaccaggacagagtgaggaattgcttagctgttgtaggttttccagtaggaaaatgatgaaaatactttgaagtcatagaactgacaattgcacacctaaacaccacttaaactagttaattttgtgtgaagttgagatgcataaaattccctttggttgctttagcagaaaaaacacataaatcattggaattatctgagccacgagatagaagatattagattaaatccccagtgaagaaacccacttgctgctattggaagcttaggggactatttttgttttctctcttaatattcttgtatagtttttgtaaaaaataggaattggaaaattaaatatgagcctatatgtccatactccagagacatgctatagcttatatatttccttttactatattctatgcataatacacacacacacacacacacacacacacacacacacacacacacacaattatctatctttgttgggtgatcctttaataaataatttggtcaaaaatatagattttaggattattttatgttcttctgcgctgttggatgtttaaaactatgttcacctcttcaataatgaagagaaagagaaaggtggtatcaaagtgaagctactgattactgtccttgtaggtttaacttataaatctttcactctaaaatatgttaaccgacagagtcttgagaaagtggataatattaattttgcagaataagcaatgtaatatatgtttttacaagaaaccttgaagattttgatgttcaaagatgaaaaacattcacttgttctttttttcatcagttcataatcccaaaggtttggttatgtagttaaatttggcaacatccaccaaaagctgtcctgcacttagaaacagaggcaagtgatgatatactatgtcatttctagtgataaattatcaagttttaccctttgacaaggggagtttcaaagacttccaaaaattttcagaggcttccaaaaattggaaccaggtgacacatatatttgtgccaattattttcttttagatttttattatcagcttcaattgctcaaaaaaggtccttagaggactttcctttactacccatgacaagcagacatccataatgaaatgaatttggcaagcacaatttccccagactttcagattatagttgtgtatttgtactcctgaatcagaatctgctagagctcattccaaacactggatgtgcatcttgacccaagtttcctgggtctgagtgactgactaggagatggagagtaccccagagtggaacacaataccatgtgtctccaaccaactcataattctcttacaatgctcatctgcatttctcaaatcatctcacagagtctctctcttaatgctagcagaaacatattaaatatcacacaagactgcaatttcaaatacatatacatctctggggaggatgccatggggaggagtaaagtctagaaccagtattcaggtttttctcttctgatttttaaaatttataacttcagctgtgatgaggggggaaataaaacctatgttgggtctccagaaccttagaatgatgagtcattgcctacagctgaggcgacaaggggcttatagacacctgcagaggctcactcaacttgacatcctgtttcccatgagctcttgggtcaagttttgcagccatggtgaagatttctgctgtgttgggaggactccttgtgctttttgcatcaactcatggttttcttaacagtaagaaaaagatgcaattctaggggtcatagttaaagaaagggctatgtcacttctctaagcatgctactgaatttggggttatttaaaaataatctggtgatccataactaataactaatgactgtaatcaggtatggttttatgtatctgtcttctccattgagttttatcttaaaagtatccaccacactggtcccaggatgctgccttttccttgaaacattttcaggctaaatctttctctgtacatttgtttgttgatttggaatatgtgaaacacttgtgttgggaggaagttgcctaggactacatgatctgaccatatgctataaagtttgaactggcagtattcagctacattcaattctaagtgattcctctgtaggctgggcatctcaatagatttgcatcattttaattatgctctgccacacaaaagatatgcgataaatttatcttttataaatattgggaaaacaatgaattgaattatatagtacataataacaattgggattaaacaactggagtcttagaaacttaccaaagtaggcacaatactgttttacttagaattctttagtttcatctagctaattgggtcctattaataggttcaaatattttaactacaagttaaattttaaatggaaacacatcattcattctctcagttcatctgttttctttcaggtatagatcttttttaatgttggaaatattttgaaaatatactcattagctctgttggtcaaaatttgaatgatgtctaagaaaccagggaatctttgctttagaaactcccaggaaatagctctcaaattatccatgttctcttgaagggactgactcacagggattaactgaccaaactaaagaaagatgcaactagaattaaaacattgtccctctgaatttgggaattcagctcaaaacagctcaattaagacataggaagatcttgaactaccattttgtgacagaaatgtatataatatctcccccccctttttttttttacagtaactgtatcctgtgtcatacactggattgaggttaaagtgactcaatttgttgccataggaaacctgccacttcaagcctatgaactcttcctaggatctggctgtcctgtctcctacagggatcaagacatatttgtattcttttatattctaagtagctgtggcatcagggtccatgtaagagcattcactttaacaaataacatattctttgacaaaccgatgactaaaaaaaatcaagctactgaaatttaattgtcaattgatttaagttttagtcacacattttgtttttttgtgtatattccttccccatgccccccacctctgtgtgtgttagaacagagaccattttgttagagttggttctccatctatactgtgggtcccagagaactaactaaggtcactaagctttgtagcaagcacctttacctgctgagtcatctctcaagccctgccagttgattttaaacattatgtaatattaactaatctattaagcttttatattacttccaaggtagaagattaaaatatagaatatagaattttaaaagctatgctatcctttacatcttctgccaataaacacttcttgtctttgtttgagtgatttttataaatcttcgagattaaaaatcttcttttcctaacagcctttaaactctgacttctttctcattatttagatttcagtggactcagggcatgtaagggtatactaatgctgtaggaatatgagagggtccaatcttttctaaaatcagaaaactaattttctttatacagacttgttcactgtgtttggtattgatagcttgtcttttccatctgaatcccatttgctctgctcttagtacaaacaatttgggcgagctggtttctggcctggattctggtgcatgccctgtttattgactgccataacttatttatctattattttatgtatatgagtgctctattggctttatgccagaagagagcatttgatcccacaatagatggttgtgagctgccatgtggttgctgggaattgaacttaggacctctggtcttaaccgctgagccatctccccagctctggctgccataactttttttttttttttccgacacagagtttctctgtgtagctttggggcctatgctggcactcattctggagaccaggctggcctcaaactcacagagatccgcctgcctctgcctcccgagtgctgggattaaaagcgtgcgccaccaatgcccagctgactgccataactttaatacctaaagcaataatcaaaatttggcaagtactcagcacacaggttgctcaaatgccatatgcaaatattgcttagtaagatgcaagaatacagtacttaggaaataggaggccatgtcaatattcatttcagaaacctgtgataagtcaggtgcaaacctagatttttctttctgggatatgtagagaagagactctctctctctctctctctctctctctctctctctctctctctctcattgaggttataaagcagtaatgtttaagcaggtagatttagaagttttcatttgccagccagagaagagagaaactaaagaagagggaattcaagagtacatagagaaataggaatttagtgatgtggcttattttgtttttatttttgagccagggtctcagtatgtcttccttgctgacctagtgagagtacagggatgccagttgtaaagctggggaaccagcattgggcagaaccaagtcctctgaatgtgggtgccagctaggaggcctgggcagtctatgggacctctaacagtggagccagtgtttatccctaatgcacaaatagactttgggagcccattccctatggagagttactattgcagcccagatactcggaggagggcctaggccctcttccaaatgatgtgacagactttgatgatccccttggggagtgggtggaggttgggttggcaggatcagtggggagcatgggaggacgggagggcaagggaatggagggattgatatgtaaaataagattgtttctaaaataaaaattagtagcttatataagtgtctgtcacctatgagcaatagatcacatgtagagagcttctggtgtttccacattgttttcttggaacaaagtgacactcatttagctattattatgtatgacaatttttcacacctcacagtgtgacagtggctgagatgatagagaggataatgtctttcaagagtaaagtatttacttcttggcccatcttgtaaaacttttgccagtgcatggttcatattatcttcagtttacaaacgagggacatacaacttctgaagttgtcaagtatttagccaagatttacaccagagtcatttagatcctcctcaatcacaccctgattcttaagtatgattagcaaaaatcagctatacaaattaaattccagacacatcaaagtccctgaaaccatgtctgcaagggacagacagtttatcagtcaattctttgttccattttgaatcttgcatttgtatctactttataggataaagatacatggctcattttcatatgctacatttaaaaaattgaaacaattttcaagagattatttaattaagataaccaaatttatattctttatatcatcaggaattgccacatggtacaatcattgaaagttcaatcatatattctccaatccaactaggtatcactttacactatccaatatcttgcttgattccaaggtaagtgtaacaggatactgacatttggattatttgatactatctttggttatcaggtcttttgatgagagaaaccagtggacaatatgctgagattgtgtacaaggctgagcttgaccttcaatgttctacttaaagtagaattattgtaattatgatttcctttggctagtaggtatttcctcagtatttctcattatttcctcatataaacagattaactttacatatatacactttaggcagaaagaagtgtctttggaatttgtaacataaatatgtaatggtattgtatgtctttatctttcatgtaattaaattaatttctttattattatgagtgttccatggcacttatgtggaagccagaggataacttcgtgaagttaattctctctttatgcaggttctagggatagaactcaggattttggggcttgcaaatgtattgtacttgtggatctgtctggccagctccaatattggctaattaaaaaaatactttatttcattttatgtatattagtgtttgtctacatgtatatatgtgtataatacctgttgccaacagaatctagaggagggcatcagatcccctgaaattggagttacagctgattgtgagctactgtgtgggtgctgggaatcgaaccttagtcctctggaagagcagccagtgctcttacctgctgagccatctttccagagcaatattggttaatttttagcaaacttttctttttttatcctagaagaatttaatgtatattagagaggtcatttttttttctttttgagacaatgtctcatgtaacccaggttagtcctgaacactatagtcaaggatgaccttgagctcccaatccctcctgtctctacctcttaagtgcagagattactagagtgcaccaccatacctagtttgagattgctattcttaaatgagccaaagagttacttaaaaagacagagttacttaaaaagacaatagtcttagaacttagtttgccaaaatgagtattattgttacacatgaaggaaccctcgtaattccaacttgagatattgtggttatctcaaatttgtgacttaaacttgatccagaaagtaatgttaatgacataaatttttttccaagcatcttttagcaaaaagcatgtgttatacgttctcttgaattattaaaatattgaagccaggtgtggtggtgcatgccttgaatcccagcactcaagagtcagagataggtggatctctgtgagtttgaggccagtctggtcgatgaagtgagttctaggacaaccagggctgttatacagagaaatcctgtcccagaaaacaaaaaaagttataatagtttctgggaattgaataaatgcttctcctatgtgttttgtttgtttttttttccttgttgaatctcaatgcttctggtctgtgtgctaccccatagcttcccatcagtagcagtactgcggtgaaaactataccttttcctcccttacagggacaatttagtcttgttgatggtacttcagctaaacactttggaaggagatttaacagtgcaacttgaagtgatggctttatgaggatctcagtgcttctttagaggggaactaataatgcccatgacctccattcttcaccctttgcactgggatattttttttaataagaaatttgtcatgctgtttacataagaatggtttcagtggggccaaggactctcctagattttaaatttgctacaaaggtacctttgaataaagtttagtggtttttactgtttgtacttcttttatttgagagaaaccttaaggcctgagttacagggtataaagtacaagacaaaattgcatttttcttacttaagggggccataaatgtctatgtattctaactctatctggtctaattgctaattaaatagttagtacaatgtaatttattttttcatctcttgtttttcatctctcaatctcccattcccttttaatgatctatgtgtatgatatgacagtgcattaagtcacattttgtaatgaaaatgatttcttggaaatccaagaaatgtttattatgattggcaaggcttttcttgaaggaactagctagtaaatgtttttacatttgaataacaaatgtagggtctgtcacaattaacagactcaccaatatgtcagtggaggaactgaattaccaggtatgtgctgctgtgttccagtaagcagagcatgaatgaatttaactgctaacacaaaataaagaaattgaggtatggatcccaaatagaataatcagtagaaatttctcaagcataaaaggttaaatttaggtatagtacactgttgttctagtaatttccatgttgattttttgcccacaattaaaaaaaaattaaggcttaatttttgtttacgtgtgtgtgtgtgtgtgtgtgtgtgtgtgtgtgtgtgtgtgtgtgtgtgtgctctcgcacaaggcgcgcatgcacatgcatgagggtactgcagaggccagaaaagggcatatagtcatctgaaactgaagttacagggaggatgagggtgctgagaacaggactccagtcctctgtaaaagcagcaagttctcttaacttttgagacttctctttagtcaccactgtctacaacttttaataaaagtgttttccaggaaaaaaaatcagaatttactttaaaatattttgattctgattaacacatgggattcagggggacggcagtaacccacatttatagtatgcaccaatcaagtttagcctgcttttatcctctatctctcccactcccaacctctagtaatcaatattttgcattcagtttggcattttttagcttatgaatatgaaagagaagatgtgattgtgtggccattcacttaatgccctcatgtttcattttcctgcagaacagaatttaaattctttgtgaatgaatatcattatgtttgatttatccattcttttgatgtaatctagggtgattctatatcctaggtattgtgaacagtgcttcaataagcatgggtattctggtctccctttggcagtctgttcttatttcctgtctaaatacaacacagcaagtgacaatggtcttttcattttaaggaacctccttacagttctccaagatggctatattaacttcaatccctaattacatgggtgtttctggtcctcatatcctagccatcactctgtatttttattgttctggtaatagccatttacactatagtaaggtaacatatctcatggttttgattcattttctctgatgactaatggatgatcatattttcataattgttgccatttgtatttttcttttgaaacattcaggccatttgcccattctttcattagataaacttctaagtttttaaattccttacacaatattagataggaattctatgtaaaacgcacagtagaaaacatttttcccattcttcaggttgtcctcattctcttgggtgttgtcttaacttctagagctttttagtttgaagtaataccatttgtttactttttattttcccatttttggaatatatatatataaaaaatttcagtaagggaagtgtcttccctacagaattttctttatggctagtagaatatttaattctttcgtatttttctgtatcttgttttgttcaatgctacttttctatcttaatatcgtaccaatttgaagtcagtttcataatttagttttatcagtgttataaaaggtcatcatctggacagggaataaacactgctgttgttttcagtgtagctaatgacatttgcagacccaaagtgcatcgtccatgtttatgtgtcttatttcagaagtagtggattaactggcagcgtttagaaaagatcttgtaaagtacatatatatcctcggggttgccaggtgggtcactgggtaagggaaattgttacttcggtagacagcctgagctccgaacccaggacccacatgttgagaggacagaattagctcatgcaattaagttgtctgctaagcaacaagtacatgcacgctcagtttccagcactcatgttcacacacacaaataaaatatacctcaaaatccacatgaatttagggaatttttttgaatctgttcactcctgatatccgaactataaatttgtaaacagaagatgcaggggctaggtggaaaatcataatatattcactattcctagtagctctattgaaatctccacataggtgtcctctgacctccatacacaccttatagggagaaatcctgattagaggtaccgctaaccaggcccacttgggcgttgtcagagttatgtaacaagggtttaagattagtatcgtgaacacgagacttcctttgaatcttggctcttcaatcatttagatataatataaaagtttcaataattgaagagacctgtagccggtgagatttcaacaccacaggtcatgaactgtgtagagtgattaaaaatacagtttagccgggcgttggtggcgcacgcttttaatcccagcactcaggaggcagaggcaggtggatctctgtgagtctgagaccagcctggtctacaagagctaattccgggacagcctccaaagccacagagaaactctgtctcgaaaaaccaaaaaaaaaaaaaaaaaaaaaaaaaaaaaatacagtttaatggcggagaaagctagcggctaagcttaacagggctcatcagaagcgagaggggcatcacactggagcatattatgtcaatacatctcaatacatcttagttggtaccaacaaaaattacttgagaatcactgaaaaactctcttagccactaattattttcaaaactttcagggccagcttgctttattttattctttcacacatttaaggacaaaagaaactgaatctaaaacgaacgcttcaagagaattgaagtaggaaaattttaatctcatctcatgaagttaaattctaaaattgtggctatggtatatgcatgtatacgtattctcgtgtaagtgtggaggccagagtctcctaatttttaatgtattttaaaatgtattagtgaattgtgcacacacctgtgcatgcagtcatgtgtgctaagtggtgttatagatgttttcaaagtggagtcagagataggttaataaacggtagtttattggggaaaagtacttacgcaaggcagccggtgaccaggtttacacttgagcatgagggacccataaatgcttcccagtcagcccagccaggtgaaagaaagcctcgtgcacctctctctccttcttaaacccttgttacataactctgacaatgcccaagtgtgcctggtcagcggtacctctaatcaggatttttccctataaggtgtgtatggaggtcagaggacacctatgtggagacatttctctctacattgatgtgggtacaggagtagaacttgggctgccagtgggtaaagagaagaaaatatataattttcatggatgaatgtagttgtaaaaagtttaaaatgtgggcaacccctccagaaatatgtgaccccaaataatacatgataggcaaataatttgatttgtaatctagataatacatttaagactaaataatgggaaaatttagatttttatcacagtaccagattaatggatgatagttatcttaggtagatacaaggaatatatttgataaatagtcaatgataataaactgagtgaataatacaaaaaagttagtgtgtgaaaacttaaaagagcctacaccaatctctatagatttcgtagtgaaatgctggtcactttccctatgagaacaaaggtacctgcagcagcaccattgactcagatgctggaggttctaggcagaacatgtggcaacattaagaaagtaaagttaacatagaaggcagtcatgagctaaatatgaacaaaaccagttgcatatctttcagaaggggacatacattttctgttaacaaacctcttgttgaaggaaatataaatactgggtttggtggcacatgcctgccacccaagcactggaaagcaggaggtagaagggtcaggagttcaaattcatcctcagttacatagtaagttcaagcccagactgggctacattaaactctgcctccccttaataaataaagccatgctacagggtatgcctgttcttaaagcctctatctgatatagagcgagcattagctttactcaaggttttaaattggaaatagatttttttctcatacaacatatcctgattacagtttccactcccactaatcctcccagtacctccccacttcctgtcttctctggatccactgcctttctgtctcttactagaaaaaaaataggcttctaagagtctaagagataacaaatggacatgacaaaataaaatacagcatgataaaacaaaacctatcacaatgatgctggacacagcaacctactagaagaaaaagagtcccagaaggagacacaagaagcagagacccactccttcacactcagaagtcccataaaaatactaagttgaaagatatagtaaatagagagaggacctcatgcagacttgtgtaagtcacactttaaataagtgagctagattatttaatacctagatagatagccatatggtgtagtgaattttttaaatcacaaaaatcaatgtcagattcaaaatctcaatatgttgaataatattctaaagctttcagagtgagcattagaaaatactttttatagattccaggtccagaatgcttattaaaagagagacagtatactacagtgaaagactaattagagtatactgttaactaattcttctgtttaccaagattctctactgtattagtgtgtgtgtgtgtgtgtgtgtgtgtgtgtgtgtgtgtgtgtgatatgtagatagtcatacaaagcagtggggttggttcatgtaattatggaatattggaaattcccacacctgacattagtaagctggcaatcaggagagatgacagcaatgttctagcccaagtctaaagtccaagaaccaggaggcagtgcaagttgcaggttctatcccacattcaaaggagaggcacagtgtcacagcttaggcaggcaaggagagaaggagcaggagcaagtgtcttactcatttaaatgttagtcttacagaaagagaacctcccaaccacatccagaatagcatttactaacatgttcaaaactggtagaagatattcccaatgtggtccagggaggtggagttagcaggggtgctgttaccaagcctaatgatctgagttcagtccatgccacccacatagtgcaagagactcaatttccacaagttgttttctgaccaccacagacaggacagacagacagacacggtacatgactattctaaaatctaaagacaaatgttgtagaaatttttaaaaatatatccccaatatgcataaaccagaataatagtgttaagtgatataaaacagagtaaagtatgcacaactaactagaaagccaggaaaccatttcaagactgagagtccaaacaaatagtcagtgaacacaatttcacaggaaacagcaagatgaagaggtgcacaacctcattggtagtccagggaatttaaaactaagccacaatgagtgaatgagagagagaaaaagccaatcagaaacatgtcacgggcatgagcccctgaaacttgttgattcttgttcctagggatacaagtaacaagaatcttacagatgtgtggagtatggctaatgacatccatatacacaaagggtgctatgcagattgtttatttttatttgtactgtaattttcaatactaaggtaattaaaaaagtaaagtctagtggactaggctaagtgcctgctaagataaatgcccgttgtgctaaaaatctgtcaaatttaatgcgtgtgtgaacgacccagcaatcttgctgaagtgggaattgtgactgatcctgtcggtggaaaatggaagctggtgttttgcatcctaacaggctcacaggtgagaagatgtgaggcgtctctgcctctgcctcagtcagagggtaactgcaggcagctgagtgtagccaatgatttatagactgtcaaggatgtctgtttcctgttggttggttctctgaggctgctgctctttggagttcgacacaatgaaacttccagccgggtcaggagggttcatcctcctttgcctgttgttttgcaatgcttctggacttgagctaggtataaaaagaaatacctttggaagatgttgacttaaggagacatttccgaggaaactttttccttctctcactgattgtacaacatcaagggttggtgtttccaattaagcttagtttaatcatgaagttcccgtgttggggttgtgcttaaaggtctttcattttattacacacatttgatggttcttcaggttcagtttctatgattaatggcctcttttgagaggttcgtttataaggtttactgtgtgtgtgtgtgtgtgtgtgtgtgtgtgtgtgtgtgtgtgtgtgtgtgtgtgtgtgtgtgtgtgtgtgtgcaggtctgtagaggccagaggccagcttctgctaggctgtgttcctatgctgggaggcaaggactctggttattcctgatgctgggcttctggtgaatcttctgcccccacctcccttaaaaattttcttttttttttttttgagacaggatgttgtgaagccaataaagggctttgttgccagagggatgagcctgtatttatgaacctgagaaaggagggtatgcctcagaattaaaattgccaatgggatatagttgcatctgttatacactgaggttctagaaacaggtacaccccaactctggtacagtactgggtaaccttcagctagtcacttgaagaccatgcatttaattttgtattctaccttaaaataaatgatggttgggctggtaagatggtgtagtggtgaaagtgcttgatgctaaacaggacaacctgagttcagtctctgaggaacccacatggtagagctgactcttgcaggctgtcctctgacttccacatgtgagtgacatgtgagtgcccttctcaccataaataaaaaaaaaagtaccaaaataagacaagagaaccagtgacctgaaaacacccaaatctgtcttaatattattgtacaggagatcagagaatgtctctgacttgcactaatgtggcagcctattagttgtttctcgtgctgctgtgagatgcttgcctgtggactttctcctgcatctgtagggacaccgaaggcccttttacaaggccccgtttacttggccctctggctctcagacagggaggttttgctgttcagggcagcttggcagttttgattgtttcagttggttgtgactggtacatctgtggctgatgtacagccaacaaggtcacccccaagcatctacagctgagcaagaaaccgggccctagaacagtggttctcaagcttcctaatgctgcttgctaccctttaatacagttcctcatgttgtggtgaccccaagcataaaattattttcattgccacttcataactgtaattttgctactgttatatatgttatatataatgtaaatatctgatatgtagatggtcttaggcaacccctgtgaaagagtcatccaatccccaaaggggtcattacccatatgttgagaatcattgccctggaggattttgcttctgctttgaagtgctttaaaatacgtgtttttgaaatctccctttcctttcaaaactagcataaacaacagtcattttccacaccctcttggtttctagtacctgaaggcagccatttactctttgtggacctcatggtgagcaacaaccaccagcaagttgaacctgatgcacccactattgctttttgtcatgagcacacttggtatctctagggagggaggagctgttgttactctagtctggctgggtactctcaaatctccttgattgttccttattctaaggttctcccatcccaaggtacttttccttttgtcactcgagtctaatatttctctctctctctctctctctctctctctctctctctcttgtttttcaagacagggtttctctgtattgctttggaggttgtcttagaattcactctgtagaccaggtggcctcaaactcacagacatcagtctgcctctgcctcccaagtgctgagattaaagtcgtgcatcaccaacacctggctaaatctaatatttctacacaaaatggaaatggtgttgtgtgactgaggttggggttgggaattaaatattttttgagtcagattagcactagaaaactcctgaacaaaataggtttaaaattccctgcttggatgctaataccaatatattttattttattaaataatcatgtttttcctgatctttcatgcctggtacacacaaagctactccctcctctagaccacagaaggcagatgttataaaaattaaacaaatggctgtgtgcaatgatttctcctctctgttcttcacaacttttcacctgcttttgttatagtccttagccaacttgcatttttttagatgtactaaaataaatgtgagagcgagctcagggtcttactaatatatatgaagtgattatggagggtagtgatgcccaccaggtaatgctccacatatctgactttggttagcaaaggccttgagtaaattacttatgtcattaaaaggaaataggttacctgtgtgaatagaaagtaacttactgatgtgttctagttcccactttttcactctgatatagggcccttctccagacttgacagactttgtgaattatttaatgtttgaccactctgttttcatttgggagaggaataaattacctgtactgttcatgaatcttcttgtactgagtagcaagaatatatgattgttgacctagcaactgctgcaatgacagtagaactctacataatgtggggagaaaagcaaacttctggtatgatgttttcccccaagaatgatagctagcctgcccatggatggtttagtttttaagttaaatgtgtccatcattgagttacctagttcatggctcttggactggataaaaaaaggaaatgaacaactacttctgcttggacctggccatgagaaatggatcataataatgatattaagaggctaaggattattggataagtttcattcctactccaaaatctcaattctaaagctgtcagtactgttttgatcatccatgtccatcaaattcttcataagacaatttgtactattcaattttagagcaaagatacatttcccaacaaagctaaataaggtgaacataattattattattgtttatttagcagtgacttcagtgtgttctgaaaattggctgatagtaagaataaaaaggaggccatttgataatgacacagaagtgagagttgatgaaatacacctgggggacaactgctctgtaaccagggtgctgagcttcaactatgagttttcttatcctgctgtttactgtgggattgataaatttgtaagtggtacatggttttcctttactctgcatattttgtggatacatagtctcataatccctctctttccccactcccttccctctattctgctgggcattgaatacagggccttgtcatgctaggcaaatgctctacccactgaacaatcttgccagcatcagatttttttttttgttttttgtttttcgagacagggtttctctgtgtagctttggagcctatcctggctctggagaccttgaactcccagagatccgcctgcctctgcctcccgagtgctgggattaaaggtgtgtaccaccaacgcctgaccagcatcagattttttaaattaaactttcaccacaagtcatgtgattgattgtttatacatatcatgataacatttctgattaggggttttgtaaaagtccacagttatagttggcatcttctctattcaccccatgttctgtcaaattgtatattttaggacactgtaaatagaaatatataaatggggacccattttggaaagagaaaatatacctttaagtgttcaaagttggggtctgggttcagtggttaagtcttccagaggacaagggtttgattcctagaactcatagtggcttacaactgtctgtaacttcagtctcagtgggtctggcacccacttttgacctccaagggcatagccatgtaggcaaaacatctatatataaatatattgcacatgtaaataatatgtaatagacataatatgtagataataaaaatggcaaaagttcctaatgttatcttttatttttctgtttgcttgtggagatagagcaataagagtttaaagccaaacacacagaaaagaagaataaaatgtttttcacatcaattttatttctgagaaattaatgtaaaataaaaattttctatttttctagaactgacagattatattcatgttattaaaccacacaattccatgcctcatcatttcaggtgttccagggaaatgttttcatcttgtctgagatcaggtacagactggtgtcggagttcacccatagattccaggtggtttgctctgtgaagaggtaggtatgggtagacaactactctccttacacattcctaaacttacccattgatgggtagatgtttggggacaggttcagctactaaaatgacttagaggatgcttctggcacatctgtggttgttaaaacatctgattgttaggaaacattgcaagtgtacagaagaatggaaaggattttgtaaggaactcatatcacctacagtctatgatttaaatttttaaaaaattccatgctatgtgtgtgcatatgtacatgtgtgtgtagatgtagacatgtatgggtggagaacggagggcaacctgcaagagtcactaacctacctaccatgatggccatgttggtccctgggcttaacctcaggtggtcagatttggtggcaagcacctttgctcactgagtcctctcactggccagtttttaaactttattatgtatatagtttcccaccatttcaaattgaaagcaggagtatatttcctggtaagtattatatgcatataatgaactggaaacccaacagttatttgcagaaattgtattttacatacaatcaaatatgtaaatattatatatgtaaatatataattataagtatttatcgaatcagttctatgttccccatcctcttgtcagttccattggtgtactccatctttgtgtcggtatcgcactgtccaggctactcttaaattgccttgtgacttagcaatgtcattttcagtcactcaggatgtttccccacagattgtcactataacttcatgtttcctgatgggtggaaaaggtcagacagggaaagctctgtctccttcaaactttaagttacctccacaccgtcctatccaacacagtaacctggagtgccacatgtagcatttatctttacataggactgaagtttagttctttagccaaacaagattctcctaaccccaggtgctcagcaacatatctgcttgtgcagatttacaatatgtcctttgtcatagaatgctatatttagtgctgcttatgggaataaacatgattcggatggatggtagccaatgactcttcacaaacacttagggttctcttgttgtgcctttgaacttttaagtggcatttcttcaagttctgtattttaaaaatacctatttttattttagttacgcatatgcatgtgtgtctccatgtgtgcattcatgtcatgggtacagatgcttgtggagccacaagtgttggattccttaagctagagttacatggagttgtgagccccccagtgtgactgctgggaatcaaacttggtccctttgcaagatcagtatatgacttttaactgctgaatcatttccctagcacccaatcctgtattttttgatgatagctgattttaagttgtattataatacaagagatgaagacacaaatatcagatgatttgaaggatgagtgatgagcaagacatgggttataggaagcacgattgaacatttctgatgctccagctgctgtggtgacagctttcttcaaccatcatatttgatattaattctgtaaagaatgtactgtgtaagcttttctctcagtgaaggcactgaagctgtaggcattgcgaagccctggcaatggaaaaccataaaacggtttcacatgtgtcagctgataccagtgtttctgcaaatctttgacaatctgttctttatggccttctatagagcatgacactgcaggtccagagctgagcctaggggagcctttggctctctgaggaacaggtatgcttctctggtcatgtaaaaaaaaaaattcaaagtagtatgacttctacatactccctgcaacaatgtcagaaacgtgcctatttcctttagcctgagaactgttttcccagtctcctctcaacctcggtggctgcagtgatagctgctggatgtttgtttgtttgtttttgtgtgtgtgtttgtgtgtgtgttgtaagaacctcgtgtttatctctcatgtgactaatccagggttagctcttgcttccaaacttcagctaacacagcagctgcaggcaatggggtatatggaaaagttgccttcctttcattcatatgcagagaaagaagtagcaacatggaaaggacactgtaactcctaaaatggagtttggtggattggattagtgggatatcgctttttctcaacactttaatgggatagctgtcctccctagcagggtgagtttgatggtagacttgtcctctttgtagtggatataagtcaatttttttcttttcttttaaagttatttatttgttttacattccaaatgcagtttcccctccctcctctcctcccagtccctcccccccaaccatctcccctctgcaccccacccccacccattcctcctccatttcagaaaaagggaggattcccatgggtatcaacaaaacatggcatattaagttgcagtaatactaagtacctctccttatattaacactgggcaaggcaacccagtatgaggaatagggtcccacaagccagtgaaagagttagagacagccccttctcccactgttagtcccacaagaagactaagctatacagctgttacatatatgcagagggtataggtcagtcccatgaagcttccctggttgtctgttcagtctttgtgagctcctggggaaccaggttagttgattttgtgggttttcttgtgatgtccttgactcctctggctcctacaatccttccttcatctcttctcaggattccctgaacttggcctaatgtttggctgtgagtctctgcatctgtttctaccagtttctggatgaaggctttctgatgtcgactgggctaggcatgaatctatgagtatagcagaatatcaagaaaaatcattccactgaccttttttctccagttgtgtttggttctatcctaggtctctgggccatccagcctctaagccctgcactccaggagtgtcaagagtgggctctctcttgtggcatgggtctcagacgggatcagtcattgtctggccactcccacaatctctgtgccacccttacagcagcatatcccataggcaggacagaatgtaggtcgaaggttatgtggctggggtggtgtcccaattcctccactggaagtcttgcctagtcaaaggcaatagccagttcaggctacacatcccctattgctaggagtctcagctggggttatccttgtagatatctgggagcttcccttgtacccctttctagtcatctttcagtactctcccccaatcccctacctgaaccctcaggttcctagtcacacccacccccagtctacccacaagatctcttccattttcccttctcagggagatcaaccatttcttttgagtcctccttgttagcttttatgagtctgtggattgcagcatggttatcctatacgttacagctaatatccacttataagtgagtacatacgatgcttgtttttctggatctgggctacctcaatcaggatgttttttttttttttttctagttccatccatttaccttcaaatttcctgtttctgtttttagcaaccgaataatactccattatataaatgtatcacattttctttatccactcttcagttgagggatatctaggttgtttctaggttctggaggttaccgatagagctctataaacatagttgagcaagtgtccttgtgatatgaatgagcatcctttgggaatatgcccaagaatctattctgttttcaatgtcaatcctcttcccccatactaggtagctgctgctgctgctgctgctgctgctgtgtgtgtgtgtgtgtgtgtgtgtgtgtgtgtgtgtgtgtgtgtgtgtagagtagcttagttggtgtggaatcatagtctgtcgattctagatagaatatttgtcacatttgatgatgtttgaaactcttattctgggattctaggataaattctagatcaatatcattggataaatattaactttatgattctattaaattttaaattcatattaattaaactaacttctctttctttccaatcattttattgttttgagtcaggggtttctctaacagccctggctgtcctgaaacttggctttgtacaccaactggccttgaactcacagagattagccagtctctgcctcccaagtgctgggactcaaagtgtgttccaccgtgcccagctgtttccaatcattttaaaagtagtacataatcactgaaatatgtatattttctcttagattatctgtactactatcaattctctaattttttctctttgccctgcttttaggcctcaattattttctatggcgtcttttggattcaatgggtatagtgtgagtaccttctgtggtggcagtcaagtaataggacaaccgtctccagtttcctcaaaaagttacacatgtgaacctaattttagcagttgtcataagataagaggagtctgtccattatttcatggctaatggtaatttgttaattaaaatttcactgaaggaactgtgtaaatttgaattctgtgtggttcagcgtgcttgaaataaaccttccaggcttggacacttattttgtcacagacagtaccttggttaaatgacaataagcttgaataggttacaccctgtcaggctcctgtcaggctcattacatttttatctcgagcactaaattgttttcaatagagcccgtgataaggagaaatgtcttccatagacagccatcactaggtctctgatttcttaacatctatagaaaagcaactaagagcatatatttatgatttgggaataaactgatataggaaaatagatcagcaaagtttaaaaatttcaagaatttgttatttctcagtgtttccctgggtaatatggtccaataagtatctttgatacacttgggtaatgtcctcgatgatatttaaggatagagatttggtttttcctactgcttcaggttgaaaatctgatttttctggaaaaggttctgggtgagctgtctatgaaagtgtttttaactgctttccccttaacccataggaccaactgcctatgagctactggattaataatccctgtgttaaaacccactttgttccctgagagacagaagcaagtggtgcaaagctagcctgggacccagtttcagccacactgctgttttgtccatttaaagaccagtagtgacatctgttaacctgtttcagcgccttcgggatttgggagatgatcactctgtaacgtcatgtttaaatgttttaccgagttaattctaagggcctttgtcaccagagctttctatttgaaggcaaaagttctaataaagcagctactgtatcagagcttacttgtaaatcaggttgcagggtggctccttctcctacattaaaatatgaaacactccagagtatgtgtagctcagcttgaactggggcctgaaaggagtgttctaattcatctgtgaattcacattatctgtaaagataatcccatagtaatatgaaattctgtgatttgttaagggtgctgggcaaactcattctaattggcccaaatcacatgaaagtgagtacaactattaaagtgaaagaaagcacactgactgttagcttcaaagctcagccctgagtgctcgccagaatcctgcaacacaacaaatgagtccaagtaactgtcagtgggaagccctctacagcttccatgcaggtttgggacaactgaaaacagaattctttgagttatttttctatttctgtgtaaagataccatgtccagcacaacttataaaagcatttaatttgttttttggggggattgtatcatggttgtagaacatagttggttccatgaccatcatggtaggaagcatggcagcaggcaggtaggcatgacaccgagcaggagctaagtgctctgacccacatgcacgaagcagagagagggacaattggaatggtttggacttcagaaaccttaaagcccacttcccagggacacacatcctccaacaaatctacaccacctagccaagcattcaaacatgaggctatgggtggtcatttttattcaaaccaccacactcggcaaatccaaatcagaaaatatgaatgctccttttttttttgagacagtttctcgccatggtattctagctatcttggaattcactatgtagactaggctggcactgaactcacagatcctcccacccctgcctcttgaatgtttggaataaaggcatatactagcatgccaggcagatgctcatttttttcttataatatttattatacttgtggaattccttatgatattttggtaaacttgactgtcatttgaaactaacagagacaactcactgcctggtcagtcacctgaagttgttctgtaatgtttcatctttagcccataggccatagtgtgtctggcagactcctcagcaaagtaggaaacttcaaactgtctgcctgtattggcagtttgtcagccacttttctctgtgtcttgtaggatgtctggcagactcttcatgatgcaggaaccttgcagcaatgtccatcttgtttcagcagtcactttcctgtgggtcctgcatgtccattttatacagcataaagtcagacagtccagacaagagcagtttcttgcccaaatggctagtctcatcatattggaagcaaactccataatgagtttcttcgatatccatcttcccttctgtgacacagttggtgttgccaggagcagttgtctcattgtcaagaaaaaccctaagccattttaaatgccatattctgtaggtctttgaaaggtttgaagaatgcctctccaattgaaatatctctatatatctagaaaacctaagtaacctaactataagttttgactattataggtaactataatctgtatttaattatacattacatttttaagtgagctatacaaacacaatacccagacaagaggagaaatatacatatcacaaattgaccttaaatttgtatcaataaatgaaaatccattccaatacaaagtattcatttctttaccataatatcccttttacctttaaaaagagattggttttggtcattaatcattcataacctgccccatttaaatgaaaacaaacatttataaacaatatttgggaatgtgggtattgttctctctaaattgcttcctgctgattgggggtgctgtttataccatggggatcatgacaaaacacagaaacctggccaactccttggttttgtagtctgtaaagctgttttagatattggaccggctgggccactgtttcagggggtcttgcttcttcaaaccatattagtctggaaggaattcacacctttttattttctgtggaaacaaaaggagaaactctttgcccaagtaacctgtttagacttaaattttgtaaaatccctttttaagtttttgtcaagtttttatgtggaagtttgtaaaaaacatgttgagtgccattatgttacaggattcccacctggttctgcagacacctcagaacccccaaatgacactgctcttccagaggtcctgagttcaatttccagcaaccacatggtggctcacagccatctataatgagatctggtgccctcttctggcctgcagacataataccatatacataataaataaatcttaaactttgggactagtttaagttttaacatgctaactcccaggaaagataaatattctcgtgtttgcagacactttaatttgcttagtgtcctaattttaaaagctatgttctaaaactaatttaatgtgacaatgtcctcagatgactactgtagaagaaaattcatggtttttaattcaggcgaacagacccatctcatccgtgagatttgatgtcacctcctttccctctgtagtttttcatccacatctgggacagctggctgaggtcggcaggcatggccttatcctctgggacagccagctgggagattatttatcatcaagtacttctgtcttttttcctcttaacagagagcctgccctcagagcatgagcccagaagcacagagccaggtgagtagaggttaatgtctctgaaaccttgaaacagaatatgtcgtccttccttcaagtatgtttcctgtattttatcatggcagtagaaaagctgactaatagacaaggcagtacagtttttttccccatcagcattctgagagtataagatgaacagtgctggaacagctgggcttcaggaagatgattctaaaatgtcttatcctgatgttcaatctcccccttcagatgatcagactggggttgggaagcaatgtgtcttaaatgcacatggacatttagggatgagccagaaacaaatccagtttccttctcatttcaccaactgtttaaccttctttaattatcacaaccatggtcttcctattagagagctatgtgctggtttgaagcatactatgatgcctaaattgacctataaaatgtcacctcatgtgacttaaaagatttacatgcatcctgtcctttaaaccttttactgtttgttgaagtggctgctctaattttcaggttacaaatgagacactgaaccctcaagttcctttcagacttttcagctctaaattaaaaaaaattagatacattttatttcatttccttatgtttctttcttctttccctaaatcatgttcttggcatttcttttttttttgtgatattccatctgcaatggcttttgttgaaacagtacacaggtggtggcaggtggtgcaatggtagcagaggtggggatgtgctttgtcatttaccactatcctttctaccaattccctgtgacttctgtctaggtctactctttcatctgtccctgcacttgactctgggctcatctgccagccttggctgcagagctactgctgagcctctctctgcttgccttgtagccacagtctcttatccccaaactgtccttcagtgtgggataatgctctcttcctgtttcatgcactctgtccccacttatgatctggctttcaggactaggacctcacctttcattatttttctcttccacaaactctctactttggcttctcttgatatcactcagaatattggcagtaacatggacataaaggtatttatgataagatcttagcaatgaggaagaagggtctggaaactagagtcaaatttattcttattatatagctgcacaaaagttggcaagatttcatgcatgttctggttgtgtacttcatttgtcagagtgcttgcttactgtgcacagagcccagaatttcatccccagcactatgtaaaccaagcatgaagatgcttgcttataaactcagaactggggaaggagcagcctcagaagttcaagagcatccttgcctccacaatgagtctaaggttaacgagctatatgagaacatatgccattaaaaggagttatgtttgtatcccaggatttttttttcaagacagggtttgtctgtgtggctttggagcctatcctggcactcgctctggagactaggctggcctcaaactcacagagatccatctgcctctgcctcccgagtgctgagattaaaggtgtgtgtcaccaacacccagcctgtatcccaggattttatggaatatggaatgttaagagtattccaactaccatgtgatcattttaacagcaaatagtgagatccaagagggaaagagcttaatgtgcactttataattgaaaaaggaaaccaaaatggaaagagttgaaaatatttccagaatggtcaggtgaagaatgcaaaggcatgtgtagctattagcatagacagagtggtccatatacaatgggagaaaagtccaagaaggatttcagagatcctcaaggcttcttttccaggctcagagctctaaaagaacagaatgctttggggagatggacacaggatggcctccctgtcatagcccctagcactctgccctgaatattctagaatagctcatatgcttcttccagggctcaagtaagcttgggtgtgggttagctggcttcagagaaagtgccatgtaagcagaaggcttttccatttccagtctggtccaacttgaccagtttctcctgcccacagggtccctgcgccatttataagttaaccactcagagatagttctagccttgaagggctgcaggcacaggactccaacctgagagatctaaagcctcagatgacccccccaaaggggtacagtgagtcaatgcaagacattggagggccatcattcaccctagcactcccagaacatggggtatgggctgatgtcattatcagcagtgtcacgggagtgaggtgtaggcagtaggttcctaattgaggatggagtttggactcttagttaatttttctcatcactgtgacaaaatactaggaaagaaaaagcagctcaggaaagttttgtttctgttcacaatttgaagatcaaatgccaaaggaggtgtggtgacaagggctgctctagctgtgacagcaggctgctcacactctgcagtcaggaggcagagagagacaaacgctgcctctccgctcactttttccttgtcacccagcacagggcctcagactgtggcgtgctgaatcccatattcaggattcatcttccaagataagcttctatggaaactcacagaaatgctcagttatatttcactttccatgagatctcagaggattaattatgtgcatccaccctctatttctttcacagattctcctttgctctcactatgctaggacatggcaggaaggccctcagcaggcgccagtgttctggcactggacttaccagcttctatgaccatgaggcaaagaaacttttattctttataactcaccagtcagtggtattctcttatactgtcaggcaatggactaatataacttgttaactgtgaggggaatctggttatgttttctatgccagttttatcttctatcacactgactcagtagtgttatctaggtcatgggttatcctaagaatggaagaaatagatgcacatgaaacaaactgaacaacaagcagcagttaatatacagtaaccttaatatatttaaactaccattgtcttagtttataatgaatgaactaaccttgcttggcctgggaggattaaagattatcatgcacataaaataattttaataacatcactggtgcattatgtaaacacagtcccttagtgaccctgttatatccctccttccaacattattcgatctgcctggcttcacctttcaatacatagctaggcccattcttcccccattccacaataccttcccactgacctacccatattttctgcttctattccttgctccactaatgtgtgaagcaacatcttagagtcagaaggtggtggctcctgataccagcttccttctttatgggtaagccttggggaagtggatgggtgtcagagccctcaaatacgggtatgattagcacaccttccaggcagccatcgaaaacacttccactggatcagctgaggtattacacaagcaagagattcgttaaaccccaggaagaaggggctgctggttttgggggacagactgatgcctcttctgtagtgagatggacttgaaggcttgaagggaaaggagtctgttaaagtctgaagtctccaaggtaaatcctacaggttccttctccttaggaatcctttcatttttcatctgctatggccctcttgggatgcctaaaaggttcctattgggttgttcagcagaagtttggaatttttagctgtatggatgactgcctttagaatacaggtattaccctggtgctattttggcacaatacagctatttatttggaaaatgtagatatggacagacagatacacacacacacacacacacacacacacacacacacacacacacacacacacacacacacacacacacacacacacacacacacacacacaccacacacacacacacacacacacacaccacacacacacacacacacacacacacacacacacacacagagagagagagagagagagagagagagagagagagagagagagagagagagagagagaaagagagatattttgatatattaagaggctgcctctggtggccagttctggttatggggattcctgaaacatgaattaggtttggtgggacagttcctgcacaagctcagaggtagagtgtagtgataactagaggcagattttgacccttagcatctttgatccccgcctgatggacttggggatgttatttcatgctctgctccttagattcctcatctaatctataagatggagagggttatagtgataatacctgttccagtgggtgttctgagaactgatataaataaaacacccagaagaacttctgctactcagagctgggaaggtgagctacttaatttgatgctaggaagcctgcattttcttgatattttaaaagcctaattgaccatatttcatagaacacgttttgctttatctgaaggtggaagctcacatttgattttttctactctccaaatatttctatggtgttttcagcatgaaaaaactcagtgcctgctgatggattttgaattattatccatagacatggctatttctgaagtatgaattaactgactaccaactgtgaggcattgggacagtagagcaaagatgatgagcacacagacataaccaagcgcttgaaaattaaactcagactgagggatgctaaggaagtgctggggggatcccaggggcaagcagagagggttcatcatgcagactggaccaggactgaaaggagtttcttccttttctattttttaaatttaaattagaaataagcttgttttacatgtcaatcccagttccctctccctcccttcctcccgtgtgcccccactaaccctctatcccatcccccttctgctccccaaggagggtgaggccttccatgggggaaatctttaaagtctgtcaatccatttggagctgggcctagaccctcctccatgtgtctaggctgagagagtatccctctatgtggagtgggctcccaaaatccattcatatatatgctagggataaatattgatctacttcagaggccccatagattgctgaggccacctcactgacacccatatttagggggtctgaatcagtcctatgctggtttcccagctatcagtctagggtccatgagctcccccttgttcaggtcagttgtttctgtgggttttaccagcctggttttgaaccctttgctcatcactcttccctctctgcaactggattccaggagttcatttcagtgtttagctgtgggtgtctgcttctgcttccatcagctactggatggaggctcaaggatggcatatgaggtagtcatcaatctcattatcaggggagggaatttaaggtggcctctccactattgcttagattgttagttggtgtcatccttgtagatctctggacatttcactagtgccagaattctctttaaacctataatggctccctctattatgatatcttttattgtgatctcctctattcttctgcttcaacctttctgtttcctcatgtcctcctcacccctcctcttttccccttctctttctcccagctccctctcccctcccccatgcacccaattagctcaggagatcttgtccctttccccttctctagggaaccgtgtatgtctctcttagggtcctccttgtttcctagcttctctggtggtatggattgtcagctgctacttcttttctctatgtctaaaatccatatgtgactgagtacatacaaaagatatatgtttgtctttttgtgactgagttacctcactcaggatggtttcttctagttccatccatttgcctgtgaatttcaagattccattgttttttcccactgggtaatactctattgtgtaaatataccacattttctctatcaattcttcagttgaggggcatctaggttgcttccaggttctggctattacaaaaagtttgacccaggggctggaatttggtttggtaaaagagaggttatctttgggcgtatttgtcgaaggaagggagggtttgctttgtgaagggagcagttctagaaagggacagtatagggtatgaatcctgtcatccaggataggaatcttgatgaatgaacaaaacaaaactctccattacactaaaaactattattacaaagtaatagaaggaagcatgaagcttttgggttctttcccatgacagccacaagcaaccccaaatggcctcccagggatttgataatacaggactggggacctcagaaggtggaacctcaccaggtagtcatgaacgagaggatactgatggttctgtttatcagctcttggacggaccaagtgatgttcaaagaggagtactgcaagccctcggggtaagtctgcctttgtcccaaagttggtttatacaagaaggaacaaatattacatggactgcctccaaaatttctgagttatttctcactaagtcattgaagacaagttggggccatagagacctgaggaataaaaatggagaatcagtgtctcatagggtagaatgtcctagcaaactctggagagtctattccaaggctcttaatcgtttcttggtgtgttctgaccactcaagatctgtgaagtttctctctctctttcctccctttccctccccttccctcccttccccttccctatggtgctgtggatgagacccaggtcctcatgcatggcaggaaaaccctctattattgagctatagctccacccctttgtgcatttttaggcagagtcttactaaatcacacagattggacttgaactcattctgtaactcaggtagatgcttctgcctcattctcctaaggggctgggattgcaagcctatgtcaccaatgataaccaaattctatattttaaataaaaacatttaaaataaaatttaatagctgtttacctttgtcatattatgtttgtgaataaagccttcttagaacaagatcttgcttggttaatttaggcttagcattttaaccatttaaagccatggtacctcctcctttctgaggaaaataaaaataatattttgccttttatatttttttcttcttcttacaggccacccagatcctgaatggaatagtgattctggccctgggtgtatttttgggttctttacagtatttgtctcaccagttcaggcatgtcttcttcttcaccttctacacaggctatccgttctggggtgctgtgtttgtgagtatccagtcccttagccacagaccatctctaactcagtactgccagtgtgctgtaatatggaagtgttctttgaagattatcagctgtggttttgatttataatttctgacagtaggaggcaaaatcctctttctttcaaattaagccccttcactttgtataataattgccagctccatccatttttcctatgcaagttatgacttcagttttctacatggccaaataaaattccattgtgcatatgttacacattttatttatccattcatttgttaataggtatgatggacatgggcagttccatcttctgggtgggacttagagttcttggatatctacacacacacacacacacacacacacacactcctgtaagtttgacaaactcaggaatatgaaaactgtatgttttctcttctgtgcagtacctagattttattttttatatatgaacctaaatgtttgtgtgtatgcatgtctatgtgtgtatacatgcatgtaagttgtgaaactagaggagaccaagagaggagacaaggggtcttaagggagtgaagagggacaaaagacagtaacagaagaatacatgtgtcacttctcagtctgataaaagactgtgtgtgtgtttccagttcactgggtgaagcatggattgtggattcgacattgctgaaactgtgagatagttaagataaaatttgatggaagagctaaactctgaaatattcatgaattgttctgcataataaatcttgacaacccaagtgaagaatttccactctggattttagaaaagacagaaaggaagagtttcaggtgtccacaagcattgagttttattttctcagaaagtggaaggggagccagagggatggcttagcagtcaagagccccggctgttctcccagaggacccagctttaattcccactctgtaactccagttctagatctgaagcccttttctgacctctacaggcactgcacatatgtgtatagatgtgcatgcagggaaaaaactcacacacataaaataaagtttaaaaaggaaagggatcttggagtcagtatctcatttgctttagcatcaccaaaagattggatcattaattacagttctagaagcttctctctggctctaacactttcggggcaagtccaaggtgtatgagccacactgtgaacatgcctgcggggtgtgcactatgcagtcctttctattgattcatcttttataattctaccaaggatgtggttttagagattaaatgtgaatgttgggccctcagttcccttattagaatgtcagaaatagcaaaaagatcttctgttgggatctctggaattgaatgagagctatatattagtgttcatttggatgctttctgtatcctggcaaacatgtaatcccacagctctcaggtgatactaacatgcggatgtgatactagataaaaaaagaagctgaggtaaagaaacagtgatccacccatgagatgaagctggtattgaaaacaaagatgctctctcactaagtgcaatgaagggaagacctgtgataatcttggttatctgaggcagaacaaagactgtcctgaattttctcctttatgcttctctcataaatatatcccaactacagtttcccctccctccatttgtctcagtgtccccgccccctttcaatcctctcccatttcccttaacaacaacaaaaaagaacaggcctcccagcaatatcaactgaacatgtcataacaagttataataagactaggtataaaccctcatatcaaggctggatgaggcaacccagtaggaggaaaagggtcccaagcacaataagagccagggatagccctcattcccactgttaggagtcccacaagaacacccagctacacaaccataacatatatgcagaggaccttgctcagatccatacaggctctgtgattgctgcttcagtctctgtgaggccctctgagccctttttagttgattctgtgggctctgttttcctagtgttcccaaaccctctggctcctacaatcctcctctgcccttcttttgcagggttcccctggctctgcctagtgcttggctctgggtctctgcatctgctcccatcagttgctggattacacctctctctgatgacaattggactaggctctgatctatgagtacactagaatatcattaggaatcatttcattgacttttagaattcagtagttgaattttatttagcaagcctttctttattctccaagatttctaaaatcttaccaatttaaaatatgaaaaatttggatatatatatatgtatattctcaaatatatatattatatatatatatatatatatatatatatatttgagttgattaaaattagagtcatggaaataattgcacattaaaacaatgatctaaaaactagagaatacagaagtgggcatttagaattataaattctcttttgaagcatctagacagataaatcagatgcatgggcagtgatgtgagaattttaaaaatgtgtgtcatttatattagcatagcatgagcataactataatattatttatatccacatataaacccattaaaagttacacataaacaaaataaaattatgatgaatttacttagaatatgaactatgtaaaaatttcagtcacataaactagtgagtagtgtgaaacacacttttatgtgaatttgtgtaacttctgttagacacctactgtcaagggaatgctgaggagaaagtgatcaagactaaatgttcctttatctgtcttcctattttaacagtttatcagttccggatccttgactgttgcagcagggagaaagcccacaagaagcctggtaagtgtcaattcttcctctttgtctagatgaccagaggaatagagaagcagaggttagtgaatccagccaaggagccaagtctcatctagtgcacaagaaaatcaatttcttcaagcattcagtggtagataatccagaaaatcaaattattctgaatagctagtgagtctgaagcttagaagcaggtttcttaatgttcatcaggcttaacaaattatttttaatgaatgatctttcactattaccttcaaaactgaaagcaaaacaatctaaccattcattcactcgtttgtttgtttgtttgtttttcaagatagggtttctctgtggagccctggctgtcctggaactatctctgtagaccaggctggcctcagactcacaaaggtctacctgcctctgcctcccaaatgctgggaataaaggtgtgtgccactactgtccggaccactgtcttttaattattcattataacattactaactattgtgtgttctttgcgttatctagccatttaacccccatctgtttggtttccctcctcccatcatagctgtttaatcatagtattccaccctcaaacaccagtctttttctctccttcccactccataatgacaggcttgctccctgttcggagaaactgaagctatggagagactttcagacatacacattctgacatctgctgtgtgcactaaatcaccccagtgtacgtttccctccagccttaccctggaggaactcttcaaacttaatccccttacttgggtgttctagaccatgtccttttccactatataaattcataactccaatttgtccctattaggccctttaaattagcatataaacacattactatctatctgtctgtctgcctgcctgcttaccaacctacctatctatctcttggcattattttttcttgttgttgaatagtctttttgtagtgtcaagatctatcacttggattggtttagtaaaaagctgaacttggccaatagctaggcaggattttggggacagagaggatgctgggaagaagggcagagtcaccagctagacacaaaggaagcaggaaagcagcacgggcagtacaaagtaaaggtaataaagccacgaggaggaaagtagttaatagaaataggttaatttaagttatatgatctagtgggacaagcctaagctataggctgagctttcataatcaataatgtctccatgccatttttttgtgagctagcagcccaaagaaaaatatgtccacattttcctgatagctaggtgcagtttatttttctgtttgtttttccagacaaggtctctctgtgtagccttagttgtcctggcactcactctgtagactaagctggtcttgagctcacagatatctttctgcctctgcctccaaagtgctgggatgaaaggtgtgtaccaccactgcctggccccaaactccttttaaaaaggaattatgtatactgtctcccaattctttctttacttcctgtcctctgtaacttttgtccttaagaatatggaagggagaagaggaggggtgaagagaacaggagggagcaagaaggttgagttgggggaaaaatagaagagagcaagataagagatatgataatagagggagacattataggtttaaagagaattcaggcactagggaatggtctggagatctacaaagatgacaccaactaacaatctaagcaatagaggagaggctaccttaaatgtcctcccctaaaaatgagattgaagactaccttatatgccatcctagagccttcattcagtagctgatggaagcagaatcagacacccacagctaaacactgaactgaactgtataatccagttacagaggaggaggagtgatgatgtccagaacagactggtgaaacccacagaaatagctggcctgaacaagggagagcccttggtccccagactgatagctgggaaaccagcgtggtactgatccagaccccatgaacgtgggtgtcagtgaggagatctaggaaatctatggggccccttgtagtagattagtacttttccctagcacaggaatggactttgggagccacatagggggataccctcatagggggatactctctgagcctagacacacaagatggacccaggcccatcccaaaggatatgacagactctgaagatcccccatggaagacctcaccctccctggtgagcagaaagggtatggataggtagggtgttattgggggggggaggggggagggagagggaactggaattgtcatgtaaaataatcttgtttctaattcaaataaaataatattaataaaatgaatatggaagttgttcaggttgctaaaacagtgctcagttcttgtccttcacttggcttcacttaaggtcagcatttagcttacctcctctcctgatcattttgctcttgggctccagaacatcttgacaattcctcctgtcccttgaagtctcttttcccagttccttttttttttttttagactgtttaatgttgggtgctcaatgttcccatctttggcagttaccctgctcagcctgtatttatttcaatgacttcagccattttcattgcttaaaatgacacctctgtggtcacactcttgaaatacatgaaatacatgctcctgccaagatttttctcctgagcatcaaattagctcataaactttgcttccacttagaagtctagaatctcccaaacccaacttctactatccatcatacctgttttgtgaaatctcatcttcatgtcagctgatggaagcttcatccttctacattcgtagattaagaacaggagtataccccaatctctcttttcacattcccgaagccagtatttcagtaaatcacataggctccatcttcaagtcaagtttgtgtttggccttttctcatctttccttggatggcattccatgtagtctctaagtgtgctctctgcttccatttgtgaacctcttttcctgttcttaataaagacaaagtgaccctttttaggctattgatctatcacctctttgtgctaaatgctccaagaattttgtatttttctcagaattataactaaagacttttttcatgaattacagggctttatgtaatacatctctctgttaattctgacttagtttcctaatcttatgcactttggctcccttgtttcctggggacactgtggcctcagggactttaaactgtcttctttacccagacttcctctggggcatctggggaaatgcttaattatttattcctgtctacatatgttattagtacttaatgtcacaaacgtcccctcctttcactatatttccattcttgttatacaattctattagcctcaatacttaggtaaatagggcatagtttatatgtcagtgtgtttattattttctttaaatgagatatggtttcatgtgttatagggtagctttggattttaatctcagctatcacagagtgctggaattgccggcatctttaacgacacctacttaatgcagtactaaagattgatcctagggcttcatatatgttaggcaagtattctaccagctgagctgtgtaccccaacctcttcactgtctttggtactagattgtactatgggggagtctttgttcatgggagctttggctgcagctagaaggctgttgggagtataaatagatacttctttaaatggaatgttgccaaggtgttaaaggatgttttatgtacattaatggactggttttttgttctgttttagatggagaacagttttgggatgaacattgccagtgcaacagttgcctttgttgggactgttttcctttctgtacatttggcactcaataccgaggagttcaagagttgccagtcttcccactctcctgacttatgcatttgcctgggttcttcatcaaatgtatgctttaaaactgctaataacatatttcataacattcaaaatatgcagaaaaacagtatcttatatactatgttaacttgaatgttggctttgctttttagtcattttgtagtgaagggcattagacaatctgtatatattttaattttcttatctttgaaatgaagataataatgggtagcacctataatagttgataagtaatgaaagcagtgcttagatatcatgttgcattactattgctactatttattatactctccagagagaatgcattaaacaatttatttcacgtacctttgtttgatgaaacaaacttcagagacatacaacttattctgtagtctggaatgtttgtgcatattaggtacacactttatcaactgggctatatacacatgcatgtatatgtatatgtatatgtatatgtatatgtatatgtatatgtatatgtatatgtatatgtgagctagattgtgtatgtctgtgtgatatgttgcctatgttccctgcattatgtatgtgcactatgtgtatgtctggtgcctgaggaagtcagaagaaggtattatatctcctggaactggagttacagatggttgtgacaaaacatattggtgctgggaactgaacccagatcctctgcaagagcaacgggtgctcctaactgctgaactgtctctctaggctttcctttattatacttttaatcacttaaatttatctgtgtctgttttttcagtttaagtggtattttttccttcatagaaatttttcccctccattgaaatttgattatgtgtttcttctaggtgctcagcaataatgggaaggaaatttctccagtaatgagttatggttctcccagaactgtatttttgtctttggcctaatgtaaatgcctatccctccccatcttaaatcctgttgatggaatcatgaagggatcattttttgttcattttactaaactgtattaatttctgtaatttattatgctggtaagtgttagtgatagtatcagaatttttcttttatgatttcttctcctcttgactagttcacataggtcaatctagcaataacatatctttctcccaggacaatattttcatgattttgtattgatactggatcccttcttcagaatttgtgagtctgaccttctgtctaatttgtgtctcactccgttcccctctgagggttttgcactctagtttctttctgacagttttccctctgaatgtttccactgatttgatgtgagacatcttttccccagggcctggtatctctaatgctgatcctcaccctgctggagttggcagtgaccatttccgtctcagtcatgtggtgtctaggaaacattagtggctcgagaaaggtgagcttgtataagcgatgagaaagttctatcaccagcaaattccacaacatattaagttattcctgacttttaggacaagaaacttttatatggttatgacttgtagggttctgggaattatttattagatcaaagtgtgagatgaagcagggctggaaatgattcagatttgaaaatgcaagctatatattaatttacattttaattaaatgcaacatttaacatgtaaataacattcggttaaactaattttaattattttcttgtaatcttttatttttgagctgtatgactcaggatgaccacacattcttgatagatatttagatctctaatttggtttcttaaaattttccactttcaatttctttttgcccaagaaagctttatacagtcctacatatttaggtatacaaaataggtattcagatcaaacatttatgtataataaagaataaatgcatttatttaaaacaaattgttggtatgtcattttaccacttattaaagaccaaagcaaggttgcatattaatgaaatgaatgtgcttgtttatttttccataacaattaaatcttggctttatattggatgctgcagggtggagattatcttgtttctgagagttgattaatgttctgatgttattattgtcaaggctgagaatagtactgtgcattacagtaaaaatgatacaaatatggttagtatgtttatagccattttgaaaactgctggaaattctatcctaatcctgagtcaaaattcattcaacaatgttttatcaaacaagtcagcaatccaaacagcaattttaaaaatcaaacattctaacacaaaacaacccaaatatatgctgattagatgcttacatgctaaggaagaatagtagaaaaatattacatggatttgttttctataattacactattatgcttttatgagagaagttgattataagcggtggattaccaatgtgtaagcagaagattagggtatttttattagggatatgccttcctacagagcagcctagccagctgggaggaaatgtagtaagcagcgcaagccgatgaagcagggaaaaagaactaccatgtgcgtaccctaactcttaaacctcttctacatcaccctgatgtcacattcaccacgccctgtgggatgtggccaggcatacctgtagccagcccctaggaggtgtggttacagtgccccctacagttgatgccattcataacatataaagagcttctaacctgagcagcacccactggcgttctgtggtgtggcagccgcatgctgtgtgttcagagctaaggttgtagtgaaggcatgcaattcaacaggggcaggcatggccagaaacaccttggttaggttagcatttgatttttattgactttcccctgcacaatctccacattcagttctggaaaccacatatgtagcagcaacctatagaaatggaaataaaaatgttttgattgtctcctgagtcatataatgattattcagtgtttaacagggtaatcatcggtgaaggaaaatctgtggatctgtggtagtgaccatggtggcaataagaaaggatggaatagagaagggaaatgacaatcctcttcttgagaactgccgtttcattttctaggcaatttcttcaccttctaagtctgcagaatctggaataccccctgatggaagtgattctgagaacccaaacactcagcttcaagtcaccacagagtgagagcttcacttgagaactcagaagagcaagaggagatgaaatgcaatccttctgtcatggcattacccatgagaaagctgggaacctgctccaattctttctcccatccctgtaaatctactagcatgttctagatctgggcgaataaatatatttccttagacattcttggatttgcaacttatatgaccctccttacaaagttgttcccagaaactggatctctttctttttttctcctactctattgctttgtgaggtttaagaatgaaagaacataatacttaattgccccccccccattttctttctttctcagtgtctcatgtcctgtagggttggcttacaacaacctatgtagcctagtctggtttgaactactgattttcccatcttcatctcccaagtttcaagactagaagcacacacaagcacactgtttgatatcttatgctcacagttctcctcccaactgttgagattacaggtgtgagccaccggatccagctataattactattgtgtgaattttccataaaatccaaattgctgccatctcatgggaaagagaaagagccagatatttttttttagcacagaaaaaaatggtcttaattttggctgacatcaatattataatctagcaagtaaaacaaaaacaaaccattgtgattaatttacattttactatacttgaagcttaaagtttcagattctatttccatcagcttctgggcatcacaggtcccagcaaaatggtggtttgaatcagtggcttttcttcttcaaaggaccttgggaactataaagtagaaatgtgaaaagcaaggacaaatttgacagatctggggttcaaattcaggttgtgtcacctacttacacctgtatggccatttgtcattaattctacttctattatgttacagataatctacttccttttatttgaatatatcttcaagcaacccttatcagaacatactaacactatacaaggacactgtggtttcctcagtagcattccctacaccctgaattgacagccaccttcagtttttggtggaattgacttcacttggaggtccagggacacaccctgaatgatctaactctatttagataccatgatgattgtgttggtccatgatgtctccacaggcagcgcttggctctagtgtggaaaaacatctccactgaggaggctttataactttctcataaaatatgtaacttaaatataactagaaatggaagccactaggagataatgacttaaggttgctgaataattgagctaaggcaacacaagagaaattcagaaaatagaaattgactttaagttaaccactcctagaatttgcatctagaatctgataacagagggtatctggacagacagataagagttagaatgagctagacaatcaccttggtagttaacaggaccttgggctgtaactcaagacaaaatctgtctacagggaggcttcaaggaaactttagagccagaatgaactgggtgaatcttgctctgaacatttctgaagtcatatggataaagaaataaagattttcccttaaagtttgcacttggcatttgaacttttagaggcgtttgtcctatagccatttctgtaattctatttcctatgaaacactggagcttgatggcagtataaactgttccactctaaatcatattatataggattaaaaccaggccctcaagactggtagaaagtatctgaaccacttcgccaggcctcttactcacatagtttgatcttagatgactctaagatatggaaatgtgaatatgagacaggaaggaagggatgaaaagggattgtggaaaaaggaagatgagagatgagacagacataggttgtaattccttggtgggaggtaccagaatataccttctaaagataacctaacttaaaacctttcacatgaaaatttgtgcgtatttattttaaataaagttagcatttactttgagaaaatatttgctcatgagagatttaaaagcaaatttcttttgagtttggggacacacccctaaccaagaaactatttgtaattgatacctgctgggagaaggaaaatcagttttctccaatggagtggccactctccagggaatgtccaatgattttgtttgtttgttttgtgtgtgtgttctctttttgtttatagtttgagtttttgtgtgtctttttggtgttttgttttgagaacgagagaaggaacatgaagttgggtccatcaggaggtggggagaatctgtgaggacttgggggaggagaaagaatatgatgaaaatactttctatgaaaattaggaaaaataagaatataataaaaatctaggatctaactaagcattacagctcagatggaaagctatcctggcagccaggagtcaaggaataccacaaagacaatataagcttagcagcttttagctctgctccaggaaggtttccccaatgtaagtacaactctgctaggggaaagtttccccagtgaaagtgttacaactcggatgactccactcttcttcattcccacagtgtaacaattgtggtccactggagcaaagtttcccctttgggaaactttagggaaagtgttacagttttgctttcctgagctttgatccagcctctggcaaagttgttacagttgggctctgctctggcaaaaatgttacccatacaacaaacctcgctcaagagatttattcggaaggaagaatccaggaggtgtctgcctttagggtgagaagcaacagcaaactgaacagggtacagattttatacaggtttttttttttggggggggggcggagggcaggcagagctttccaaggtgtcttgggattggtagatttttgcagcctgattctgggcccagttcaggaattggtgggattttgtgctcagggacctcaaggaatggtgggattctgcagccggattctggagcaagctcaggagctggtgggatttcaagacctgctcgtagggttctatgagtcagagtctcgggtctagttagaggcagggtgtttctttccttggcccttttcaccctacactaaccaaatgaagaaacttgatagttaaagagaaagccagggtaagaagcacttgaaaatgcgatgtgtgccagaggacaaatgctatgtggtgggggaagaaatgctaactctgttatctctcccttccaggcagacatatggttaaagctcatcttgataagtgcccaccaataaaggaagtcatttgatcatatgttcagatacttgctgctatggaaggtggaacaacaagtctgtgagaaacggggctatgagcacagaatatgctaagcatctcaggaaggggaagtatgaagctgttgttaaacacaggggtgtgaaataattgggaggtcataagtcacctttcagtactgtatctgcgtttcatgagttgctgttgacaattctcacacggcagcattatgtcccaacgtggaaggacacactcagtctgtttttttatagatttatattgatttacagatataagagtgttttactaacattctgcatcgtatctgaccaccatgcattgaagctggctatgaacaacagaaatgtataccaagcatggaaattgtacaactcagtattgaatacaaattgtgtcaatatagaaatcaaaaagctaacaatctaagcaacagaggagaggctaccttaaatgccctcctctgataatgagattcatggctaacttatatgccatcctagagccttcatccagcagctgatggaagcagaagcagacacccacagctaaacacagaactgaactggaacccagtttcagagagaggagcgatgagtaaaggagtccagaccagtctggtgaaacccacagaaacagctgacctgaacaagggggagctgatgatccccagaatgatagctgggaaaccagcataggactgatccccatgaacgtgggtgtcagtgaggaggcctcagaaatctatggggcctcttttagtagatcaatacttatccttagcataggaatggactttgggagcccattccacatagagagatactctctcagtctagacacatgagggagggcctaggccctatcctaaaggatatgacagattcttaagatccctcatggaaggcctcaccctccctagtaggcagaaagggtatgggatagggtgttaatggggggcagcagaggaggagagggagagggaactgagattgacatgtaaaaacaatcttgcttctaatttaaataaaaatggagaaaaaagcaattagacatgtttgtagttaaatgaaagttaaaatataacatacaaaatcctatggaatataatagtcatttctaagagaaaagtctatagcaataaatgctcacattaagaaaagaaaaaactggaaggccttgccagacttttctaactctccagggaaggccttacccacctctgaggagtggatgagggttgggaaagggggtgggggtggggaccaaggagaaggggagggagggggaacttgggttggtatgtaaaatgaaaaaatttaaataaagacgaaaatctaaattaaaaaagaaaattgttttgaaatcaaaagaagatgaaaacacaagacatgtttctgttttaaaatgtacattaattacagtgagtgcctacatcaaaattggataaatcttgtactagcaacttcgagacaggactgaaagagctacaagaagaaatgacaccctcagtctcttaactcttcaaatctcaaataggattcctgatttttgttgttgttgttgttgctgaacataaacctttaggggccgggtgttggtgtcgcatgcctttaatcccagcactccggaggcagaggcaggcggatctctgtgagttcgaggccagcctggtctccagagcgagtgccaggataggctccaaagctacactgagaaaccctgtctcgaaaaaaaaaaaaaaaacaaaaacaaaaacaaaaaacacccccccaaaaaaccccaaaacaaacaaaaaaacccaaaacctttatgtgttattaggagacattgtaagggaccattacatcgctcaggactttaccctggagaggagtagttttgcaaggattggataggggaatgagatttctaagccaaccattttaaggctgggctcaaatatcaccttgcctggcaattctgcctttgaactctagcatgctccatcaggcagcactgttgtaactttcttgattttccagcagtcactggcctctgacctcctagataatcatttttctttgttctcatctgcaatactgtgggctagataagtctgggatcatgatcctcaatagtgacttctctatgatatgagcaatcaatagcaagaagattaagtcctttctgtattaatgaatgagaagatagcacttaccccttaattcaaatagtgtttttgttagattgctaattcccaaagatacagaggaaagaagtagctggggcagtaaaattttgttaggaaagatttggcaatatgtacactagaatcctctattaatatgcatatcttaatttctcttgggatattttatatcccagaaagtaactcaggtgattagggtaccacacagagtatctcgcagttctgaaaacatgcataaaaccacactgaagaacttgtgacataggtatagcagatgaagttttttaagagcaagcctgttttcacctctgcgctcttatcttctcagtgcctagatgcttcaatattaggttttattaatcccatgttttaggtggaattatgctctaaaatgctcatgtttctccatttcatcctgttctctattcagtagatatctcagtcttattactttccactgtagcaagagaaaagaaccagtgatatcaatcagctggaagacttatctgcatgaagataaccatttgtattcagagtcaacccatcttaactgcccacccagagcacatcacatctccgagtaacagtaacacatctccttcattcctgagtagcttaattcatgaaaaaatggatgcagaaaataagagcagagcagatcttgctctcccaaacccacaagaatctcccaggtaagtaaagactattgctatttccactgaagttatttatcaagacaaagaaattcacagattccaattcatagatttgtgcacagactcaagtaagttacttaaccatgtggactatacattcttagtgcctttttctctcagcagttggcagcaaggtttttgcttagcttgaaaaccatgtggactatacattcttagtgcctttttctctcagcagttggcagcaaggtttttgcttagcttgaaaactggggttaccggattttctaacattagagacttgtagtttcgggtagtaggaagtttgaacatacgtatctcttgactctgtcagatgtgttttaggggccagaggctttctatgatgactgcatcccaggttggcctttgtgaaacttagggcatgggatcttccacccaagattaaaataggaatggagactgagctccaaagcagtcctctaagtatgaagttgtgggcattgacaaaatgcatgcatatatatttctatgctaaaatgactttgaagtctacaaactatttggttgattttgtttaattatagagattgatagaaggaacttagggcaacctgggatgaacaagagcatgaggcatggtttttcttctcttctgttctatgtaaacacttggataatattcgaatgtctgtggtttttggctcttggtgtgttcttctcaggactacaccaaaaagttcaactgctgatttcttttgaaaaaacaattaacagataacactctcagttctgacagttaacaacttcacacaggcagttgagatgattgaaattttgtaaatttcagtgcgcctgacattgagctcttggaagtatctcctgccgctgaagctctgccagcgaagccagcgccacccccaccacagcagacatggcagacagttttgaagagtgatttggagttcctgggggtgagttccttgccgccattctcaactcaaattcaggctgcctctaggaaagagtttggatgtattaacatttcctcttgtgggctgatgtcctgtaatgttcttgataggtgaggaattgatggcactctgcacattctgggaagagagaagcattttctcatgaagacactaagttactggaacatgaatggagaacagaaacgaaggatagatacacagtgtctgttgttaattagaaagaacagttgcttatgtccatcataactatgtaaataaagatgtgtgacatgtatcaaccatgaatgcattagagcctactagttacggttccattttttaatatagtaaatagaagagagtagaaaagtctcacatgtggttcaatcttaggaagacctaagacactaaagagatgtttccattttcggtcttacttacagagaaactggtacagtcttgagaaactatatcctaattttataaaattcatgtcttctgcaggtaacacaaattctggctggtttggtatgcctttgttttgggacaattttctactcctcagtgcacatttcagactttgatgacgaagtgcttctattgtatagaacaggctatccattctggggaccagtgctggtgagaacacataagtagttgtttctgaaataatgctgatcacaggttttcttttaatcaagtctaaccatatttctctagtactttgataaaatctacagtttttcacttgtatgcatatagcatctataaatgcagtttccaaagctctctccacatataacttattaacaagaacataagattcttatcacccttagatgaagtttaaaccattagcatacttgttgactgaaaaatttaagactgtatgaaattgtaaaagaacaatacattaatatttaagaagttgaatgattaacctaagatttgtattctaaaaagtgctataatactatcaataaaagtacatgctaagtacatatattttattcattatcaaaaacaaagttaagtctggagagaggccttggtagttaagtgcttgctgctcttacacaggacatgagttcagatcccaggaccatgtcaagtgctcatgcctgcctgtaactccagctcaaggggataaggaccttctctggtcttgagcatgtgtacacatgtggcgtacacatacacagacatacacataaacttgcaaatacaatttaaaaaaaatcttagaaaacccacaatggccctgccccaaatgatgtggcagactttgatgatcccgcatagaaggcctcactctttctgtggagcagaagagggatgagaggggggtcggtggggggaatgggagaatgcgagggagagggaatggggattgatatataaaataagattatttttaatttaaataaaaaacaaacccacaatggcataaaaggatgtctttgagaagggagggggaaatatcgcttgggggagaaaaatactggatggatatctgttgaacccttgacatacttttggccactcatgtactggattcttttttacacattctactatctggaaaacagtggcggaatgagagcacgttctgtgtaaagaggaattctgtgcatagaagaattctgtgtgtagaaggtgtagaatttgataaaatttcacacacacacacacacacacacacacacacagcccacatgtcaccctcagtacaataagcctgtctatgattttcaaagttacgtttgccctctgtctttgtgctccctgaagcaaccactgtaactgaaagttttccattttcagagctctgtagaaacagaattgcatgctgcaatgtctcgaatacctgtcttccttcattccacatcgttattgtgtattacgtttattgataattcagttatagacatagatttagatctaagaaaaacaccacattggttccatacactgctaagcatgtggttcacagagtccttggtcacttggttaagaaccttcttgaccatctaccatattttccttgaactttctttttatttcccaatatttagctttaaaacttatttgtttaatctctctttctctctctgtgtggtgtgtgcaatcctaggatgtcatttctctcttgctaccttgtgcatctaggaactgaactcaagtcattgagtctgagttgtgttacaagtacttctacctgctgaactatctcataggctcaaatatttagctctttaagtgcccctggacacacaaatctcagtttcttagagagtgttctgagtttttacttttactaaattttctatatttactttatggaatatgtaataactatatgaccatgtgctactgagcagactccataggtatgcacagcatggatacaggtgtctggcctgggggagctgacagtataagacaggacatatgaacaaagcattacaacaaatgagactgctactgcagttgtacatcagatatcgctagccctgctgtctacccaggaagtatcaaatgtagcctcacaagggagccttgcaaaaatgaagagccacgggtcccatttaagacctaataagtaagagtctgcatgcttctttttttttttcttctttttctcacagagtagctcaggcttccctcagacttacaaccttccttcttcagcctcttgagtgctaggatcacaggcatgtggcctcacactcagttcagaccctgcattttctcagggctttcgcatggtttgtataagcagttgactttgagaagcattttataggaattcataatgagtactggtctcgtgggaggttttagtatgagcacccaaagcttgatcttgtacttcaagggcagaggaaggaatgttccagagagcagatactcactttcctttctctcccatttcttttcggacagtttgttttgtctggatttttgtcagttatgtctgaaaggaaaaatacactgtatctggtgagtcgcttttattcattcttccaagggaagacaaatggaatttcaggggtgttaagggagacccaccagtatcagctgtgttacagagttcggatatgtggtttacctcaatccctttgtgcttggctttttacagcaaaaagttggataaaatcattagaaacataaattgtgtcacttaataagcagtgaaatttgattgtcttgacactatttaaaggggacccacacaggtattgtcttcgtacatatttaaatagtcttatggctatacaattagtttccaacagagatgacttaagggtagtctatgcatgggtgtgtctttttttttatgctttgcattgagctcttgaccttctgcaatgcttaaccctgtggtcctctgctgagttacatccgcagcccaaatgctattcttgaaggcatcggatagggaaacgaatgtctgccagatgatgagtacatttgcaagagttccttagttcactggaattttagacagctttgaattactgtgcaggaccagctctgaaagacagatcagttgattggcagctgccactcacagccccagagctgattgttcttctgccagcaggcgagaggaagcctgggagcaaacattgtcagcagcattgcttcgggaatagggatcatcatcctgatcctcaacctgagccacaattccacctatctgaaatattgtaaggatctaaatgaggacgatggctgctttgtgactgctttcatcacagtatgtatcgcttgtgaatacactggatctctgggtcctaacctaagtgtgaaaccccatttctttttccagagacacaattccccatttggagtttacatctcataatatagagctatgaactttgagggttccatagccactttccttaagcttagccttatcatctccaagtagtcacctaatggcttcctattcatgtgtcagtttataaggtgtgctcctgagggaggggctggaagagggagcttctgtaagggaagggatttgggggtacatctgtctgtgactttgcctgttggttggttgctgtctgacaggaaatggtgtcgatgatgctgttcctcaccatgctggccttttgcagtgctgtgttgcacactatctataggattggagaagcattcaagagtaataaggtcagtaggaactcctgaatagcatgctaaagagtttgtgctttattcttttaaaatatggccttaattttctgcaactttttttcctgaaaaactacctctcaaaaactggattgcaaatctcactttggaaatcttattattatgaaactgaaatatcacatgatcatagcacagtcccttgaggattagacaaatggaatctttataattatagacattgtgggtgctttgaaggggtcactgtgagaagtgtgtgatggaaacatgcatgtgttagggtttactcttcatttttgttcccaaagagcttgtttgtttctgccttctcttactccccccagcaatgtgatttttcttccctctgtcaattgctctaaaaaagccttgagttttcttttcctcttggttcatagtgacaactgtgctttcacctgctgcacacattcattatatccttggtgggaatttccaattctcaaccactatactaactcaactctgacttatgtaacctactgctcaccatctattttcattagacacactccagtctctacacgtcttaggatcactgtcctgagtcagaagataaacatttcagatacagagtaaccttagcaacttgtcactgatgtgatttcttttagcccccattggccaggccatctgatttgccttctagatgttaaggaaataatttgtcatgagaggtagggtgaaattcaaaaaagacaaaagaagaaattcctgtgtgataaactttctagaaatggagagttctgggtaattgatacaggatgatttttttctttctcaggtcacagatgatcgtctttatgaagaactaaatgtttattcaccaatttacagtgagttggaagacaaaggcgaaacgtcttctcctgttggttcataagaatcaggggaccagaacaatctgattcacagtagaatcctgaaagacttttacaaaattacggcaaaattagtaattgctccactttctgccagttttacaattattctctggtgccaatgttttagtgtgctgtttctgatctctaaatatcccctatttgtggatagtgtccattccaattttctaatttttgtgtcacaatctcacaatcattcgttctggaaaatcatcaaggaataagttagcttatattgtatgtctacgaccatgaacaaaaggaaaacaaggaggaaatatgctgaggaattaactaaacttagaaaatcaggtaattcttttagttgttcatagaattctcatcagcgatagttgggcatgatatgtatctactattatccacccctacctagaaatatgtttttaacattgtatataatttttatatggaaatattttgaatcccagtgataaaatggctttttcaaagacacaaaattttacaaaaattgtatattttctgatccatcagtaattcactaataaagtcattgttcaatgatgtttaccaatagggaacagggaatgctattaagtcattcagtctaataagatgaataggtaaaatcaaggacattctaagtgtatatatcattcagctagatatgtgatgaatgacgaataaattgatgaagatgaactgaaaagtagtcaatggaaatggcaagaagaggtcatgtaaaacacatgtagataaatatctactacaaatttggtaggtctgggcatgtatgcctagaatcccagtacaaggccagcttctgttacacagtgagttagaagccaacctaggctacacaggatcctacatcaaaggaccaaagaggaaattagttcaagttgttaacaccttaaaagatagctaaacagacaatagttgactgatatattgagtgtttgagtctttaataaaactgaatattaataactttgtggggaaggaaagcagtaatatggaaatctgatggtggaagagtaccagaggcaaactaaatatataagattagtcttagactttaattcttagatggttgtaagggtgatcattattaaaagaaaaagatcaaaatgctaggagaactattttgagatagaattaaggcaagttaaactcctatacttagaagggcaaagaaagtatcaaatccagaaagcataacaattggtcattacaaaagatcagacagcaggtagcatatggtggaggaagttaagcaaagagaaaataattaattaataactaatcaccagagactgtacacgttggcttgggaaaaaggagaaaacagcaatcctaaatgaatgcaaactatgaagagggattggggtggggtgggcagagggaacatttgcaaaagtgcttagagagactgtgaataggaggtagtaaagaaaaacaactgagaaaatgactttgttgctgttgtttagattttaaaagaaggtaaaaaaagttcataacctagctaacagaacccaatcagacattgaaaaatctatttggggatcagttatcttccccttgaacatacacagagaagatggtaggcacacttttataaatcttcatatgttcatacagccataatttcttgcttcactgtttgtctacccaccgtgtactagagtagtaaaatgtgcttgtgatctccttatgcataattcagctggcatttttacaataaatcagaattgtttcacttgatttttgtgcttgcaaataaagttgagaggatggggggattttgaggaagaaaactgagggtgtgtagggaaccaaaaattatctattataaagtttctaggggtccaaatctcttctccaattttctagagactgaatctccattgtattgctgatgctggctaattgctgcctgatggcatggcctcagtggagaatgttccctagtttgtattagaacaggtctagcccctgaatgtgacacacctgggctgaaggctttgtctacacgcttgggactctttttaggtgtaccgctagggttaaaagaatgacttgatggtaggtgttctcttcggtcaccctgactattggaaagcaatttaggagaatgctagaataaaccagagtctccagtttccagcgtggactgagagtccttctgaaataacaagatgtctgtgtgtctggtctttatggatgttgggtagctaggagtttccaggtccagcccctgcccacactcagggacgaaccccatggcctctgtagtgtgggactggtgtaggccagaccctgtggcctctgtagcatgggactgatacaagctggggccccgacagatatgatcatattctgttgtacacattcataaaggtctcaaggataaagaaaaatagttttaaaaaagcatcatgtagattaaaacaattaaatggtgccaaggacaaagaacaatttctagtgctttcttcctcaatcctttctcagtagaactgggtaattaactctggaaggcagaaagcagaatgcaggactggctaccaaccacattttgtttattaattgggtaaacaggacgtgatcagttttactagttgatgttaccgatgctaattcaattgccatacgagcttgataaagtggcttctcctggtgagcctatatcattctgggttcatccaagaggcacaaccaataggaagtgatgatagatgggtaggagaaagaaatgaaaatggaacattccctaaatcagaggtcaatgtgacagatgtaaatgtaccagaccttaaataggcaggaggcacagggccctgccctttctagcagctggtgcctgcttccccgggcactcttagtttatcttagggctaaaacattgcagattgctacatgactgagctcatgtatcagggaggaagaggtgctttcgagctccaggatgtacagtagataagattttgagttttcagagaacagaacttaaactagaaaaaaaacccaaaaaccaaaaaaactaaacaaatttgcaagattgttcccccagaagcacccagccaatgacagagagagagcaaaggattctgtttaggattattaaaaaaaaaacaacagcactatttcatgctaaatttatgtcagcttcattgacctttctttgggttggtgaattgttcagaagaaataaaaacagaatggccaggcttttgctatttgaagtgtcttgagtgtgttattagagagagagtgtgtggggggccttgtttctcacactagagagagatatacaggagaggatcaattagggagactgaatcaagtgattacagaggctgagtagtcacatgacaaagtaactgcataatggagatgctggaaccccgttagtgtgtggtgtagtctcaggccaaaggccttagcccttggaggcagggaccaagcccaggagtgtatggccttcagattccttctgaggaatatcagactcggggcatatcagacactcccacaacttgcttatagtaggtcaccatcttttcagctgagttccagtcaatcaattaaatgagctgttaatgtccttttctagaactttctttttatttatttcgtgtctttcccattatgcatctggttcacattcatctccctgttcctttgtgtctgctctctgcccttgcaacctccctcccctgccaataaaataaaataaaactcaagagaaaattgaaaaagaaaaatctcatcatggaagtggtagtgtggcagtttataccctttgttcccatatattgacttgcaagtgtttgttgcagagtcattggtctgatttgaggctgtggtttctgttacaccatcaatactggaccctcactggggctcctcttggatatcctgttgttgccctgagtcatggagcttctgtggctatggttcggcaggactggccccgtttcatgctccagcagatcaaagatggggtggatgttggggtggaacaactcaaccttggttctgatcctgggtatttgaagggttggtcagcccactagctctcccccgtcctcactaccagggtgagctctttagcattgccctgatagttcgtcctatgcagtaggatcatggagtggggaggttctcctgcttttatgccctcagggtcgactcacctacacctacaccatcagggccagatctgctgtgttgcccaggtgaggtgcaggggcattctcccaaatgctacagctggtgtggcgcagggacaactctcctactcgtaggaactcagggccagctctccctgcaagaagtggagaggggagtctctctttttccctgccactataagacaaacgaggaatggatctagggtctgttcgccggggtcctggccaacagggtcagctctgtttgtgctagccaggagaggtgcagggaccactttcctgagtgttgcagctggtaaggtggggggtcaactacctagtctgctttatgtggtgaggggtgaggagtgagggggaggcatctctccctgcttacacactaccacttgatagatggctcttgcactttcaaggccggctcattcatgctccatcaacagggtcagttctactgtgcaagacccactttaccacgtgctatagctgggaagggagaagggtcaactcccttgactgctgtaggtggcggaggcggggtggggtgggggttggaggcggggtggggtttggaggaggggagggttgggggtgggggtcacctttcccttgccctcatcaccacccagcagctgagagggagggtaccagctatcccactctcaccccccagggccagctcgcctctccttcccactgtgagcacggtcagctctatggtctccccaggttaggtgtaggacctgctctccagagggccgcagccagtgaggagtgggaccagatctccctagtgttgaagtcagtgagggccaactctctctattatacaattctatcttctcaatcttcagtggtatcaggagtcgcggacatcaacaccggctgccgctgaaatagggccatgagcccagacatgggccctggcagcagcccaggctcagacatcaccatggccttgggtggcaatgaagccactcacctcagccggctcctcactgcttttacctcttcatatatgcctctctccacaggacatgaaccattctgtctctctttctctccacaccacaccatacgtttgctcaccataacagtgcctgactgcctcgcactgcaagggccatgctttctctttggcaccttggacctgtgccccaggcatttgtgtgggtctccttgtcacgctcagtcatggtggcgctgggaagggcccattaatgtccttcgtaatccccaacctaaaacattatgctcaaactatctgcttagagagttcttatcaataaatgtatctagagccaaattcaacacccatttagctgcttttctctacacacttaaacatctgttcacacacactttccccagacttcttctgtgtaattatagtgtagaaaactcaagcagttattttcaatttccccagagatgcgcagacagcatgactttaaatgcttatttcatgattatcacagtatttatttgttcttttgtgagtgtaccatgtatgtgcattggggggacatgtgtccacatgtggaggtcaaagagagacatctggtgtcttcctttctcactgtccattgccttgagatggagtctcccactgagctggtaattatgtttacctaagtcagctagccatctctctggctccacattctctattgctcatctggagctacagacatgtgcaggcataacagatttaggggtagaagggggtattacattatttcaaaaaggagaatatttttcatcttgatctctattctgagagccttctaaaattcagtatatatcccactaatctcttggataattatcacatgtttatatatggcagattccgtgtggctgccaaacatgtcacatatataaagcattatcttctttttaataaggcctttaaagtctttttaacattttttttaattgagatgtcttgagaaattcctcagtgattaagaacactggctgcttttcaaaaccatctgtaattccagttccaggggatctgatgtcctcatctggctgcagggaccaccaagcatgcatatggctcatagaaatacatgcaagcaaaatatccatatacataacaaactaaaattgtgtgtctgtgcattttaaaattccattctattttctcatagttatttaaaacttggcatcttgtagttctaacatctatatcacatctgagccttcttctgggtttattagtaaggtattagtttatttttacatgtttttttaaatattacttttttgcctcctaatgttttgttgaaatttggacagattattggagactgaaaatactcatatagatacaagcttctcatgagtggagatggaaaaggcggagtaagaacatctgcactgtgattacttcgttcacgacacttcactttcccccagtgatgccctgagtgcgtggtgaaagctgtcccacagaggctcctctcagggtctgctcctgctttgaccttacttcttctctccatgctgattgttagaaggacactcttgtatgtcatcaggcatgtagaattatgggactcaggccttctcaaggatactgctcctcttccagctataatgatggcctcaaagctcattccgggccccttcctgatgcacccttttgtttattgattttctttcccagatgaagtagatttgcatccatgccttcaggttacctgcttcttttcatattaaattgtcttttatttttcttaaagataatgagaaatgatctccctctgtgtctcacagtgctcctgtaggcagagcctacaacgaactatgcatacttttactctggatcccctgcctctaacactgtgttgtacactattcctgaaggaaagcccacagagaattgtgaatcccttttctctgggtctctcagtttccaccccacttctcaagttgagtcttctttcagacttgtgtctttggtactgtgtgaatggttctgaatggccttgtgccttctagttttaaggttaatgatgttttctgcagaccccattctcttaggggtctatgaaccatgtcaggattgaacaattgagctgaaagacaggacagagcagtgtgttaatcacaaaaaagcaaaaacaagagggggatatggagaagaaagctcaagagagcattgctgcagaaactctgggggaaattagtcactttttttttaatgtgaattgcataaggagagaacagaatgtcacagagataacacttgaagagataaggctaaggatggtgaaagacatcaaggcataaattaagaaattcctaggaatgtcaaatagccaaaattaagagtaattcttcacacctaaatgccaaaggaagataacataaggaaaagatgttgacctttagatcagccagagataatagaaatacaggaaatcagtaagttgttgttcctacctgagaggaaattgcaacaaccactaagtgaccacattcgtttagaaacaccaagccaactgagtgtccacagcagcagtggcagcaacaacttacacctttggtagggtttgtcccctcccatcactcaaggacaaatgcattttcattacatacatctttttctatttttttcctggaaaatttctcctggatcatatgataatataatataagttgcatccagaacattaaccaaactattatgggaaatactggcctgcctatgcagcccctttggtgtgtggtagacttatggaaggagaggtccatctggcttcaaaggaaaaaaaaaacccgaacatgagaactttagatacattttttttataaattcttgttgctgatccatatatccactccccactgctgcattaaaaactatcacagagagggaaattcaggatgtcatgggacctcagggaggaagcagatatctgttcctatggggaatggtctctgactggcactgaggaggttagcgtgaagagaagaaaaaattgataatcagtgacctcaaggtagcctttcttccatgtctttgtggaaatgtcctgctgtatttctggaggtgtacaatgtctggccaacttttgtatcttgggctggatctatatagttattataactgctgaagataaattcacttccggtgtggaaaaggtgtccttgtagattattccagaagaggaaccactttgaaaaataacattatctctcttgcttctcttcctttcttagtcattatttatttgactagataatataatctcatgtttttatatgatcttttgctttttccttttttatttctcattcatagtctagaccataagtatgtcccctcatgttctaaaatgtttcatttttaagcactaatgtgttatgaattaataagcatcttttctgctggggttcctccctccaaggggaatttctcttggtgggatcaatggacagtgtttcaccaggggctaggaaggggcctcagccagcttagtgcctgctttacaagtagtaggacttgagttcaatttctccaaagcccgtatgaaatagccgtgcccaaacaacctagaagctcctcagccaaagaatggataaggaaaatgtggtacatttgcacaacggagtactactcagtggtaagaaaaaattacaacatgaaatttgcaggcaaatggatggaactagaaaaaaaaaaaaacatcctgagtgagataacccacacccagaaagacaaatattgtatgtactcactcataagtggataccagacataaagtaaagaacagccagcctacaatccacaaccccagagaagctagaaccctcttccagaaacagatggaagcagatgcagaaatctacacttaaccactgggccaagctcctggagtacaaccgaagtgagggaggagcgataatatgaacacaggagtcaagaccatgatggggaaacccacagaatcagctgacccgagctagagagagatcactgactccagtttgacaaatggggaacctgcaagtgatagaactagactccctgaatataggtgacaatggtgctactggggcaatatatgaggccactggcagtgagtccaagatctaacgataatgcacaaacccatttagtggagaccattctctatggagagataccttgcccagcctaggcacagggttgggggtgggggtgggggtggtcctgcctctacatggtgatgagacagacatagtttacttcctaggagaggccttgccctctctgaggagctgatgggaggtggggggtggaaagtggggaaaatgagaggagaggagggaaggggaactgagatcagaataagtaagtaaataaatagactagcaatgaccaggggcacctgactacaccccagagctggaaagacatggtgtgtgtgtgtgggggggggcaggggcacagggggttctctggaacttattgtccagccagtgtagtgaaataggtgagctccacttctgttggacagcctgcctgaaaatataaggtggacaatgattgatgaaagtgcccagtactgagctctggtctccacattcacacaaatctgtaaccactcacacatgttcactccccgccccccacaaacagcaggagaaggggaaggaagaagaggaggaggagggtgaggagaaggaagagaaatgagtttcatggtggcctgtgtccaacccagagtatagatcgattagggtgcatttaatatcttgttttatgaataataaaagggtaacagagaaattctagatggcatcctagatttgagttcatcctcagggagggacaaatttggaatgggttcatttcctatagaaagtgcggtttaatcgcctgataggagttaattgttttttccaggctgggatgagtctgtagttaatcagcaaaaaattcacattttcctaagtgtagacagagtgggcaatcagcactggttcggggctattcagtgacgtttgggtccaagttggggcaatgctcttcatggcgcatgacatttacaggaataaaatgcacaagccataggaggttgtctgtacccaggtttcccgaggattgccaatggaaacagcacgtcatgtgggcgagcatctacttttcttggccagaaagtgtctatgctgcagattcaaggatgcagacctggactggacatgctgtgggtctgtgccaggtgccagagatggcaggatgcctcttgctgctgcagtgactcttttgcgccctctactgagaaacttaactcactgttccttttacggaagaagtgcttaaagacactgtgtcctaacagtaggatttcagaatcatcaaccagcacgaactatatatactttgctcgctgtttaacctccagcaccaaaatctattctgtgtctggagtattttacacaatgataatacattttgggcaactaaacattctttctttataaggaacatataaaagtcatgtcatatgtagtattttctgcagtgatttattgtcgggatccatccacaaagatacgcagtagatgacaactgatatttgtaaggttgacccaccagataaacaatttatccgacggaggataaattcacaaacaaggtttatgggtccattgcctatgaaaaacagattgattctgtctgtaattctcttgagtgctaacgcgatccctctaccccaccccaaatagccatgggattttctccacaaccttgacagtgtgttcctcactttggggcgccattactcctgtactgatagaaggatgacttctccccaaactgtgtaattcgggtgaataaaacaagccctcaagcagggtggtggtggcacatgccattagtcccagctctccggagacagaggcaggcagatctctgtgagttcgaggatagtctggtctaaaaagctacacagaaaaactctgactcgaaaaatccacaaacaaaacaaacaaaacaaaacaaaacaaaacaaacaagcaacaaaaaataccaagccctcatagtttagcctttgttacacaaaatggtgagaaacttaaaaacctgttctctataattagctaagctgacagcgcaaattagctagaccgagagtctctgtgtatggatggtaagttaaaaactttgcagatatgcacaaggacagagatgtaggtgtctaaaccaatattattagcacaaagtggtctagaattagccagtttctgactgaaagcagagaccagtggccactccctactaagttacttagcaattaacactctgcccaaacttctaacctcagtttatggtataaaattcaaggcttagctaactaagtgtctatgtttaagtcctaaaatttatatggaggacaagaataacaattaccgattaaccaagtccagatagaaacaattttaccgaaaaaagtttcacagatggccacgactacagaggatggtctggcctctcacagccttgaataaaaagttacaaggttccctcctgtgattccctccataaggaatcacatggggttatatgtaggagaagaaaatgtatctttaggtttgggatgctttcaatgccactgcccaggaaagtgtcaaacaccatgtccccgcttatgcattgccatggtaaaagctctgccctttattgtttactcaaggaatgtattatggccctgagaaaagtttctgtaactttttattgccaaaagcttgttgctaaatgtgtacataagctgtgtgaacaaaggaattggggggaattggaactaaagatttagaactggagaattaataaacatcttcagcaaagtggcaggatacaagattaactaaaatattagcagccctacaataaacagaagataaataggctgagaaagaaatcagagaaacatcacactttacaatagccacaaacaacataaaatatcttgggcatttgaatcattaaaaaaagaaatcaaagaagatagcagaaaatggaaagatctcccatgctctttggataggtagaatcaacatagtaaaaatggcaatcttgccaaaagcaatctatagattcaattcaatgcctatcaaaatcccagcacaattcttcacagaccttgaaaggacaatactcaactttatatggaaaaacaaaagacccaagatagacaaaacaaccctgtacaatagaggaacttcaggagacatcatcatccctgacatcactctctactatagagcaatagtaatgaaaacagcttggtattgacacaaaaatagacaggtagaccaatggaatcgaattgaaaacccagatattaatcaacacacctacaaacacttgatttttgacaaagaagctaaacttatacaatggataaaagaaagcatctttaacaaatggtactggcacaactggatgctgacttgtaggagattgcagatagattccatatctgtcaccatgtacaaaacttaagtccaaatggatcaaagacctcaacataaatccagccacactgaccttgacctgtacctcacttcctgaacatagctccaatagcacagacactaagttcgacaatcagtaaatgggacctcctgaactgagaagcttctacaaggcaaaggacacagtcaacaagaattagagaattgaaactaaagattacagagaattagagctagaaagttgcaactagaagaagagagctagaagtagaaagaacatgactggctgattgtgtgtctttttcctttaggaaatttgcctacagtcctggttgttttgaaggaattcttttctttttatcatttttttatttgaattagaaacaaattgatttacatgacaaccccagttcccttctccctccctcccctaccaccccccaactaaaaccctacctatcacataccctttcttctattcttcccctgactcaacctttctgcttcctcatgacctctgcatccttcctcttcttcctttctcattcttgtagctccctccctcctcttctcatgctctcaatttgctcaggggatggtgaccctttccccttctccaggggacaatgtttatctcttttagggtcctccttgtttactagtttctctggcagtgtggattgtaggctggtaatcctttactctatgtctacaatccacatatgagtgagtacataccatgtttgtctttttgcgattgggtcacctccctcagaatggtttcttctagttctatccattttcctgcaaatttcaagattccattgtttttttctgctgagtagtactccattgtgtaaatataccacattttctgtatccattcttcagttgaggggcatctaggctgcttccagtttctggctattacaaatagtgctgctatgaacatcgttgaacagatgtctttgttgtatgaatgtgcttcttttgggtatatgcctaggagtggaattgctggatcttgtggtagactgattcccattttcttgaggagtcaccatactgatttccaaagtggctgtacaagttggcactcccaccagcagtggagaagtgttcccctttctccacatcctctccagcataaactgtcattggtgtttttgattttagccattctacaggagtaagatggtatctcagagttgttttgatttgcatttccctgatggctaaggatgttgaacactttcttatgtgtctttcagccattttagattcctctattgagaattgtctatttagttctgtaccccactttttaattggattgtttggtgttttggagactagcttcttgagttctttgtatattttggagatcagccctctgtcagatgtgggttggtgaatatcttttcccagtctgtgggctgccgttttgtcttgctgactgtgtcctttgccttacagaagcttctcagtttcaggaggtcccatttatcaattgttgatctcagtgtttgtgctactggtgttatgttcaggaagtggtctcctgtaccaattaattcaagggtatttcccactttatcttctaataggttcagtgtggctgggtttatgttgaggtctttgatccattttgacttaagttttgtgcagggcgaaaggcttgggtctatctgtagtcttctacatgtccacatccagttatgccagcaccatttgttgaagatgttctctttgttccagcatataaatttggattgtttgtcaaaaatcaggtgtttgtaggtgtgtgggttaatatcagggttttcaactctattccattggtctacctgtctatttttgtgccaataccaagctgttttcaggactatagctctgtaatagagcttgaagtcagggatggtgatgcctccagaagttcctctattgtacagggttgttttggctatcctgggtcttttgtttctccatataaagttgagaattgttctttcaaggtctgtgaagaattgtgttgggattttgatggggattgcattgaatctgtagattgcttttggcaagattgccatttttactatgttgatcctacctatccaagagcatgggagatctttccattttctggtatcttctttaatttctttctttagagactcaaaattcttatggtacaggtctttcacttttttggttagtgttactccaaggtattttatgttgtttgtggcaattgtaaagggtgatgtttctctgatttctttctccaccaatgtgtcatcggtatatagtagggctacagatttttttgagttaatcttgtatcctgccactttgctgaaggtgtttatcagctgtaggagttccctggtagagtttttcaggtcacttatgtagactatcatatcacctgcaaataatgagaatttgacttcttttttctgattggtattcccttgatctccttttgttgtcttattgctctagctagaacttcaaggacaatattgaagaggtatggagagagtggacaaccttgtattgtccctgattttagaggaattgcattgagtttctctccatttaattttatgttggctgttggcttgctgtatattgcttttattatgttgaggtatgttcctgttatccctgatttctccaaaacctttatcatgaaagggtgttggattttgtcaaaggctttttcggcatctagtgagatgaccatgtggttttttttttctcagtctgtttatatggtggattacattgatggattttcgtatgttgaaccatttttgcatccctgggatgaagcctacttgatcatggtggatgatttctcaaatatgttgaaagaattcttattggtatccttgaggcagccctaggagctggacttcttgggctgccacaagttattaaatttttatatggtgattattttgtattggatattaaacctagggtctaatacagggaaagcaagcagtgtactttttactctcatatagtcatctcagagatagcaaaacacaatatccttccacaaatgtacatcattaaagtgatggaagaattttacattttttagaatgtgccagtttcttcaaaaatttacaagtgtaagcttgattaaataattttgctatattaaaatgaattattggaaaattcagagatggggctgaggtagagggtttctagtcaggaaaattcaccataacaagcaccatgtatcttattttcttatttgtcttccgtaagagctctaaaagtaattatcttgcatgccactttgaccttagcatctagaaaagcttctggaatcagagagtaaatcttagctgagtgactgaataaatggcatgttttccagaagtgtggactttagtggtatggcagaaagtgtttctctcctacagtcattgctggactgacagatgtgctccccacgagacgctgctggtggaattttcaagagtatgaggccacagcaaagatgccagatatcagatcagattcattttacctcttgtacaaatcacccagaatctctctgtagaagtgccagttacatggaaggggcatgtgaaacatttcgcttatcatttattttaaaatttgaaacaagcttcttttacatgtcaatcccagttccgtctccctcccctcctcccctgccccccacctatcccctatcccatgccctttctgcgctccagggagggtgaggccttgcatgggggatcttcaaagtctgttatatcatttggaccctcccccatgtgtctaggttgggagagtatccctttatgacatttcacttattcttgtacaccacttctctaaaagcatgttgaccaaagatgagcatgagggcctacttgtttatttcaggtgggactctctggacagggatatgattgaccatgtctagaattgtgtatacatggctgtaggcagagttctagatgcaggtccaaggatggtgggatgtgagggatgaagccaccaggttatttaaagccattaggaagtaaagatcatggaactagattcatctcagttccttgatttcatttcctactttgagtttacttccacattttggtagtaagagaaataaataaaatttcctcagcatatgacaggccttcttctgcagctcattgaagaggagaattcagctaaaagcaaggtgaaaactatctagcaggcagagcaccaccccaccgcacctcaagcaggcatgctattcaatcccatatacactatttgtatgatgtttttgtaggtgtgggtgtgtgggtgtgcaggtagttatgtatgtgtagtgtgttggtatgtataggtgtatgtgtgatgtggaggcatggaggtatgtgttggtgtatgcatgtaggtgtgtgtgtgtgtgtgtgtgtgtgtgtgtgtatttatgcttttacagtgtatgtacatgttgtagccagatgtcaactccaggtgtcatccctcaggaattgtctgtcttgtttttgagactgtgacttgctgggatcttgtgcttttcaagtgggttaggctggctgcacagtgagatctagggatccacctgtctctgcctctccaggataggatataagaactcacagccatgcttatcttttccatgtgggttaaacccaggtctccattgcaagtcctttaccaacaaagctttcttcccagcccctggaagtctttagggacttagaagctgattatttagggaatgtggagaaacggaaggacattaacaacaacaaaaactttaaatttcagtttattcaaagattcactaaatgcatgttcctttatttcctgataaaagtggtcatgatttgggggtacatagttcttagtataattcctggttttcataggaaattggttgttcttcaccaaaaaggaggatgctgttactttgtgtgaaaactaggctagatgattgggcagccagatcccatatttatgcattttctacatgttcactacaattactgtacttctctagggtaagaaccctgtggacacctcctgaaggtgtagaataactactttgggacagagttattccatctgatttttttgactacttatgggagctatttatagttaagataaaaattaaagctagagacagtatcaactgaatccatatttggtatctgggaaggattagaacaaattttcttgatcttctcactaggggaatagtactctgtgcttaaatttgcaataaaaatatccttaggggaaagagccacaaggaattgttgtctggacttcctctatatgtgtttttaatacaaatataatatataaatataaaatttccttggttagtttaatttgtagaccttttttttactctattgtaaacaggattttcccctaattttgttcaaagcaaattgatcatcggtattacttatttttattgatgagaactatgaaattgagaaatattagcatatgtttctggctacacttatagtaaatgagaacaataatcctgttgttcaagatgaaagcccagtgttgttgaattagaaaacacatagtatttgacacattatttaatttcctgacatcaataatgggtcacattccactgatattgcatctaaataggaagtagggatgctgaatacactgcttttaatttactttatctaaaagattttgtactatagtaagataaatgtattgagtaaatatttgacagatgtaatatatcttatagtcttctcatagcactggatatacatttgattaagatacaaataacaatgagggagaaagggtgggaggagggaaggaatgagagagagaatatgaatagaatttgatccatgtgtgtttatacaaaatataagttttacacataacagattgatactgttactccatagtacaaggacaaagggagaaggaaaagagggagaaacaagacatctaaacttcttgaagaaaacaaaaaacattgggtacctcacaacagataaaaatcagtcaaataatggaaaacactagtcagcaaagtatgtactacacatgaaggcctgactttactcatctcagtgagaactgtttacatattgtcaaagcttctatgctttttaccgtctttatattaagtcttgagtgtggctaaaaacacgtgttgtttaccattaaacacatgatttatttgttcaacatctggtattttgatagagaaccagttcctgaaaaattaaactgaatttatacacacacacatgcactcacacatgcacagcagatatgctgatgttttcccatgggggtctggcactataattggtacagattttctggaacatttgtctcttggtgtgctgatggcatcaaacctccttgaagtgatgctggagatgctgttcctaccacaggaagacttgaaggcataattaccacaacctgtaaagtcaatcagatgccaccatgtcacccagtatcctcagagcttcatttttctacaatactatgtcactactatcagcatatgcttttttatcactgggctggatttcatattaaactggtgatattcttggacattaaaacagggtagagctgggacatacattcactgacagagcttgacctgagatgtctgctgctgtgtctctgaacatcagtcccacataggggtggtggtacaaacaggtgggcaaccacagtgttctcaaatataaagggaagcctctgtcgccaatgggtattatgttagacatccaccagaagaaacacagagagctctttttccaatgcaagtatgaagatgacattcacacatctcattcatgactctctgactgtggataaagcactgaagaaaccactctgaccctgaaggggtgactgtttcatgaaacaaaagtaaatcctggttcttcttccacaagctccaagtgacatgaaattgagcaaggatagtagaaaaactacaaagcctcacagctactattgtctaggttcacgtaatataatgaaagcaatattccttggctcagagcacagacttaaaaccttaagacatgaagtttactgaagatcctgccccatccctgaatgctttactcaaagaaaaaaatatcattgatttcatatatattcacactttctgggcattttaatgcagacaccaccactaatattaatgtgttgtgatttgtcgctcactcatgagcaagaaccttgaagacatatggtatgctgttgttctggaacctcagaagaagattttttaaaaagtacaaaagatataaacaatcaccctacaacctacactgtcataactttattattggcaatgatttgtcttcctgggcatgacttgttagagccattgaggaagatgtctaattagtgagccaatactgaggttttatagctactttctcattctggatcccctggggctggtgaataaacatgatatatttattcttcctgtggctttggctttgggctcttctctctttccattttctaactttactatctctgtgtatgatattcttttttcttagcaatctagtggattggctgcaggtctcaaggtgaggcattagtcagaggtgcacaaagtgatggagaggtttgacccctgacatgtttttggcagcctggggaaggttgttgtaatagaaaatagaacatctggcactctgagcagttcttccttgagaaatagcccacaatccagaatcagaatgaatactgcatgagagggtgaggcttaggagtagaagcttttctgtagacattgtggaggtacaaatccaaaatgaaacctccttttgatttagctggaggctgtagacaagatgggtatcattccttccaatggctcacacatcagttgatgtatcacctaggacatcattctgcatgaacctttcctaggcatgtgaaccctacacaagcgccgggacgaacttgaaatgattctcctgtgtcctcagagaagtacatcatcacgagtcaacagagagaaaatgattttttccacctgggcctggaagggattcagaagcttcagatgaggtcacagcctagccaactgcacaattgatgccctttaagactctgtgcagaggactcagctgattggtgcctgcattcttgacagattgaaacagagccagtaaggatttgctattgtgagcttctaatgttatgtgatccattgcagaatgaaggaaactaccaggaacatcttcaaatgaaaactaacactcaccccactacgattgcaacaggtcactttgcatccaaagacagaaagggacacagcaatgcagaattccagcaagtctaaaatgatcaccaaggcttgcataccctgaaaacatatttacaagaaagggatgtgaggaccagcaatgacagtttccaacatttactgtgcattacaatgccagaagagaagaggcactgactgccaaatgcagctatgctgtgggccagttcttgggctattgacattcaggatgaatgtcatttgttctttctctgataggatagcctagtcttcctctcttttgccctcatctagaatattctaagtgcattatgagtacaaaatgtggatatgtttttaaaatggtggcagtagcagtaaattataaagataatggctattttagttttttcaaacactagacagtacatattgtttacaaaaataccatgctttcatatttgttaatgattgtgggtggaatattgaccgaccagaaatgtttcataccatagtcactataatctacgactgtgtgagactatgtggtaaagagaattgcttgctgaaaggatatgtgataggtagggttttagttgggggtggtggtaggggaggatgggatggagaagggaactgggattgtcatgtaaaataatcttgtttctaattcaaataaaaaaaatctacaaaaaaagggaattgcttgcagctgaaagaagcaaggtatagggagtttggcctggctttctcatttaataaaagctcttcttatttgtggaagcggaaggcaggacagtaaaagttcatgggaggtgcagagatattatatggttttatgatagaagacaggatgaaaatttgagcaatggaagtggaccctagaagccagagaggacaaggaaaccagttacacccaaaggtttcaccaaaggaatttaatattgccagctgtttgattttagtctgcaaagatccattttgaatgtctgagatctacaaccctaagaaaatacacttgaattgtgctctaaattaagagcaatgtattacagcactgataggaagggaatgcaacagtgatcttcaagttacttgctctttaattctggttcaaagagaatcatctttacaccagtctcctgctcttctgtcagaatacagggtcatattggaggaacacaggttagcctttattcaaggctcttcccctaagctgatgtctgagagtctatagataaaacattatgtttaagcaccatggctagagaagttccctctgctggggaagaatcaatatcaaaagctcagtccagaagaggtatggactcagtgtgccctgagattgcattccttgtttattcaaacctctaactcagctggtgccctcctctagcatgggcaagtggcacaaaagtgtcctaaagctcagtaggtggagactgagagttttccaggagctggatgttaaagctaaaagtgatcaatctggcaagaacttcaggagctattaaggactctgattctcaccacttagaggacaattctcaatgtacttaattctactagagaaccatgtgtctctgctaggctccattggaagctctgcagaaacagagggacttaaaactaacctttattctcagatgagataatagtacttattggggagcattttgaagttaaagaaaagtgtgtggaatgtccaatatagtaattactaaggacttgtgttctctaactgagatttcttcccatttggcttcattgcttttaggtatcaagagtcctactctgcttctgtgaatttaatttttcacattctacgtattagtgtttgacttgtttcattgtattctcagctctaagttcataaatactttaattggaaacatttctgaaagctaatggcccagtaacatcagagatgagacatgaatctgattcttcatggtttggcatatttctcactcatttctagtgattgatgagttggtcagagcccttcttcctcagctttgtttctaccttattctgtgaaaagagaaaggtactcaccaagaaaatggccagactctggatgcattggcctggcatataatcatgtctgcagaaaccgtaaacaactgacaaatcatgcaacctgctcacacttaagaagaacccaaataaagccaccatagagctggcgatgttcaatcccatgctgctttggacctaacaagtaatgaaaacaaaacaatcaaaaatattcccctcaaaataacatcctcatttttccaccagtcatttcaactttatccccctacattcagtcctccacattgtttcaattatcactatagtagacattgtatatcagtgataaacatatactaaataaatttattttatttaaaatgggtaaaatgaccacagaggcatttttaaagagaagacgtgtaacaggtacaaagcgttgattaacaccactaattatgtttgaaatggaatcacatgtcagcttatacttgctgaatgactgttttaagaaagactaaagatagatagcaaggtggtgctgaggatgtagacaaaagaaaccctagtagagtgttggtgagaatgtattggattacccattatagaaagctaatggccctccaaattgaaagtagacaagactcagcaattcctcacctcttggcatgttcccacaggaaatgagaacagcacctcataagcctttctctacccacatgttcatcacagcattgttaagactatctaagaaacagcctaaattgatggatcaagaataaagtatctatgatattcatttatatatatgtacatagacacaggcctcacttgagatgtatagatataatggagaatctttgtgtctttaaaatagaaatgtttccaatcaaagcattaatgaacttggagctgagaatataatgaaacaagacaaacagcaatatgcagaacctgaaaaattaaattcacagaggcagagtaggatgcttcatacctaaaataaagggggaaaaacatgggagatgttagtcaatgatagaaggtttcagatattgtgctggttagcttttgtcaacttgtcataaactagaattgcctagtaagatggaatttcagctgatgaattgccttcttcagattggaatgtgggcatatttatgaggcattttctttattttattaacattttttatttattttacataccgaccacagtttcccctccttcctctcctcctttccctgccttctctcttcccctttgctctcctctcccattgccatcgtatcccccttctactcccttccccatccaattctcctctgtctcaatcacaaagaagaaggccttcaatgggcttgaacaaagcaagacacaccaagttgagacatgaccaagatcctccgctgcatcaaggcttatctagattccccaaagccagctaaacaccacggtgaggtcatgatctcatggttaggagccttacaggcagactaagctacacaactgtcacacacatgcagagggcctaggtcggtcccattcaggttccctaactgttagtccggagtccatgagctcccaaaagttagataggtcatctgataaggcattttcttaattaatgatggatgtgtgaggcactctatgcaagtagtcctggcttgtataagaaagtagactgagtatgccatggagaacaagctaatcggcagcattcttccatggcctgtgcttcagtttctttctccaggttcctgccttgagttcctgtattaactgccttcaatggtgagctgtaagctctgagaggagaccaaccctctcctccccaaattactttctggtcatggtgtttatcagagcaacagaaagcaaactaggacaggctgcacaggataattaagttttagagattatgcagtgcaatgacaatgaccaaacacatgaagtttagttgcctgagaatggtattgagctcactacatttaagtagatatggatgtggaatgattgtaaggataaacttaaatatcaacatgttttgcttaaaagtgctttaaaaatagagctatagctattttctaccccagaagcatgcatgttgactaggtcattctacttgaataaaaaaaaagaatgggggaattgttactcaccaggccttttgttgttttaattcctgctgcaagcgataaagctcctgaaatgatatactgaaaccagaggaaaatatacataaccattaaagtttatttgaaaattgattcagaagttagataggtatgttaattagaagaaacatagttttaaataacaggaattttaatggagggactctaccagaagactctgggaaagtttatcaactttccaaaaggcattgaattataattatagaaaagctgtttgagagcaacaaatgataagtcctttcagttccagttctgaaataaccttagcatggcaccaaaattcaagaaggtattataagcaaaaaggactaattgagaaactattttggtgtgaaatatattttaagttgtaattaaaacaatagcacagaaacatctcctagttattagataataaatacagacatgtacgtccagaggtcagcatctcccagtccccttcccattctctggattttacattatctctatccctccttcctcaatgcttcctcagtcttgggtgtgaggttgatacattcaattttaactatgagaaaacattcaaatttaactatgagaaaactgagccaaaagacttacatagcaatatcaatttataaaaatacatgataaaatcaagataggattctaagctcaagacagtaataacgatgtcatttctgcttatttcagaaagtattcactcaccaccactggtccccaacatgggtatgtaattccaaatgaaatgttttcttggttataacgtatatccaagataattattgtcattattcctaggctaagaatcattaaggcagccagaatctgtacaacctagaaatgaaaaagtaaaagttaattatctaccacaatggtgcctgtgactgtgccacactctctccagcattatacttctttcattatcctttgtttgatatagccatattcttggcctcatcaacagtgtcagataatgggtttaatatcatgtaacaagccttaatttaaaaaagaaagtggttggttagttccaagatgactgcaattattgcaccattttgccaggtacttcactaagtgggcgtaacattaaaatgatctcttataagtcaaaatgattttgacttagtactattctcatagatccgtgcttctgtaccattattacaccattttccaggtatgttattaaatagacatagcattaaaatgatctccgatgacttagtgctatattcatggatgagtgcatctttctcaactttcatactctcattagagaagcttcctacagtagatgacagttaacacatagacccacaaccgatcaatgctcagagaacaatgacaacaaaaaacactttggagtattcagctctaagtgaatactgaacccttcccataatgcttagaggttttgttttttttttttttactgatgagggggctggaaagattataagaaccagagatgacttcaaagaagcagtgttttctgggcacaacacagcaattgcacacatgaactaacagtgattgttacaacatataaaagacctgttcaagttcaagccggacaaattccagaatagagaataagactaggcatgaagttccactcctggctgaagaaatattggcaatttatttctactaagagagggagactcagttttctttaatagtgtgacacctggcatattgaccacactgtaccccagaccccataaccaagagtaattaattgggcaacacaaactgaactcaatgaggacagagtgggggaaaggaaagtaagaccttgaaagagttttttggtaaatataatcaaaatacattctatgaaattctcaaataataaaaacatataaaaatacatgcaaaagaaaaaatgatatacaataaaacagacttgccaaaattgatgggctatagcaaaagaaatgctcagagggaaatgtacaacattgaacatagaggggcttgaatcacagatctaggattccactcagaaaactagagtaggaaaagcagattgaatcaaaggtaaggacataaaaaattagcattaggccagaaatcaatgaaatgacaatagaaaatttatagacaaaatcgattacaaataaaaagctgtctttcaaaggtaaaagataagcctctaaccaggtaagtaaagaaacatagaatagaacagaacacacacaaagttctgtctcataaatgacagggggaacatctctgaggatgccatgagggagaactggatggtaatggaatgctatgaataactccaatctaccatttttatgatctacacccaaaatattgctccctaagaagacttcctgacattctaaatggcaacatgtcaagtaattctaacagtatgaagttttgaaaaggacaaactgttagaaaatgttagaaaatgtggggtgaatatatagggcacagagaatttttaggtaaaaaaatgctttgtataacatgcaatgtgggacacttatccttgtatattggtcaagacccacagaatgtgcaatacaaggagtgaatgctaatgtaagttaaaaactttgggtaataatgatgtattggtgtaagtctaccacttgcaacaaaacatgccatttggtaaagtagaccaatgaggggggatgttatttatgcatgtgtgaggacagtgggtatataggatgcattggtaccattcagttcttttaccaactgaaaatttctctaattatgaatacataccaatatgtttaaaattgacctttagaaatgccaacatatatttcttgaaacacaactgtctgacacagaacaaaaagtagaacagtggacaattaaagaattacacgcgttcacaatgactttctcccagtggtttcttattttcagaagagataacatttcacttgacctttagtacgcacacatctgagactccagatggaaatgcttggaaaatagaagacttttcatggtctatgtgataagctcagaaaagacattagagatacagacaatatgggctgactgaaacagggcagacccttggagaagaccacagctagggcacacatagtttcttgctgctgtttcacagtatgttaaatgttattggtctaggtgacccacaactttgatgacatctgcagtctctaaattttaaatgtaactggattagaagtgtaacacaatcaattatattttttttctgatgacagtctgaaaatcaaatacagacctgtttgtatccttagtgctaggctttagtctaatgagtcgtaagtttacaatacccctgtcacttagatctattacctacttacaccaatgacttttggttccccctttaagaacttctctgacaatcctttccacatatgtgagtgcattccagcgggcttccctaactgcagcacatcaaggccagcattcagtgtggtctgttccattgcttgtatggttgtcatgacagaagacagtgctataacaaaggtaatttgagatgaagtcctgaaaatgaaaaaggagggacatgatattctgaacatgattatgctatatggaaaaattctgaacaccctcaactgtaatgataactctttcctccagccgcctgagttccaccgccatgttagggcccccaaataacacatagactcttatattagttacaatgctgctggccaatgactaggatttcttatttgctagttcagtcttaattatcaaccatgactattaatctatatatttttataaggacttatcttacctaggacgccagccttatgcatccagtcttcctggggatcacatggagactgttccccttactacattttccagaatcctccttgactcctagccccacctattttgcttccctattggccaacaatgctttatttatcaaccaataagacaaaactatacacagaaggacttcctccatcatctcctctgtctaaataaaaagaagggttttaacattagcatagtaaaatatataacaaaacagttatcaagtaagaactatagttacaatatttagtccattaacatttagcaagattttaaagaaaatattctatcatctatcctatctttgtgagtgtaaggtcttatatgtaacttatcttttataataactaaagaaaactataaccataactatctgtcttcaactccatcaaagaccacagaaggataatataaactctagaactgacagaaacatctcattgcctgtacagtcacccaaagttcctctgtaacattggggcatccattttctgcttataggccacagtgtgtctggcagacttctcagtgaagcaggaaattttaaactgcccacctgtattggcagtttgtcagtcattttctgtgtgtcctgtagaatgtctggcagactcttccatgaagcagtaacccttcaggactgtcttgttttgcaagtttagcagtaactttcctgtgggtcctgtatgttcagtttatcaaacagtccaggtaagagcagtttcttgcccaaatggctaatattgccatgttgaaggcaaactccatattgagtttcttcaatgcctatcctcctttctgacataattggtgttgccaggagcaggtgtgtctcactgtcatgaaaaatcctaaaccatttaaatgccatatattctgtaggtctttgaaaggtttgaagaatacctatccatctcaaatacatctctgtatatctagaaaacctaactaacctaacttcaattttgactattataccagactatatgcaatctgtatttaattatgcattacattttaaaagatctgtataaacacaataccaaacaagaggagaaatttacatataacaaaatcaaccttaaatttgtatcaataggtgaaaatccatacaaatgtattcatttctatatcttatttccttttttcctttaaaaagagattgactgtgatcattataatttataaccaaccccatttaaatgaaaatgaacatttataaacaatatttgggaatttgggtgttgttcactccaaactgcttcctgctggttgggggtgacgtccataccatggggatcataataaaacacagaaacctgatcaggtccttatttttgtggtctgtaaggctgtatcatcttagctgttttagatgttggatcacctgggacactgtttcagggggatcttgcttcatcaaaacatattagtctggaaggaattcaaagttttacattttctgtggaaacataagcaaaaatccttttcccaagtaacctgtccttatttttaaatttagaagccaaagaatttttaaaatatgtaagttggattaatttagcagcacctatattcaagtgtattttagcagctatagctctttccttgtcaaacaaacaatttaaagacaacagtataaaacatagtatccagactctgtgagtattttccatatttacctggccttttattattctatttcttttacttcctttttttctcttttttttcctgagacagggtttctctgtggaaatctgcctgcctctgcttctggagtgctgggatgaaaggtgtgtgccagtatacccagctactcattcttttatattttctttcccaaatctatgtatatgttttctttaatgtaaatctgtatctttttctaatcacatgagtcttaggtgctcaataacagccacagttttggccgctgtgtaaataaggaacttgctcttaaaaggagtcttggcatatctcttaatgcctgggaaatagagctcacccaagaaaattctgctatcaagaaagtgcttgtctctgttctttttgtttctaaattccctttttaagtttttgtgaaatttttatgtggaagttcgtaaaaccatgtgggcgccatttgtaagataactctttctgtcagctgcctgagtttcaccgccaagttagggcccccaaataacacacagagtcttatattagttacaatgctgctggccagtgattaggatttattatttgctaactctgtcttaagtatcaactataaccattaatctatctattttataaagactcattgaggacgccagcggcatgtgtcctctcttccccaggatcacatggcaactctgtctctttcctatatttctcagaatctcccttctttcctagtcctgcctaacttgtttccctgttggacaacagtgctttatttatgaaccaataagaaaaatatatacacagaaggacctcccccatcacccaatattataatggctgtttgagcccaagaagtagaagaaacaaattgaagaggagagatggagagacatagaaatagattattgatgggtatagtgttggttggtagatgatgacagatatataattgattgttatatgacagataagtaatatgtagaagatagatttgtgccacagtcatatctgataagaatggcagaagtcataaggccggcacagctgtttgacaaagatccagtaaagctgagctgcatgatggccaccccaccacctttggttttcaactccatctgttgcacatctggataacttttaatttcttgtacaatttggggatattgggttgatgggaaatttcttaagaatcatttatgccttctcccaggagtactgcttttaagcttccccaggaaagtcctgaacacactacctcacccaattttagggaaatatccttatctacttgaaagtcttccttatgccttggaggttgtgacacacataaagaagccagaggtctctttatgaggctacgaggcattcttgaaacatctgtccctgtacttatgcaggaacaagttactcaaaacaaagtaaacttttaaaggtcaacaaaattcggtgggctagaggagttggacacagataagattgcaagcctttccccactatgcactcaggcaattatgtggcatatacagtaacaaaattaggttgactgaagttacctgagccctacacagagacttgtattgatgagcaaggtatggaatggaaaggtgatgaaagagtgagatgtcagtacctccctttcttagaaaagttagcacatgcaaagtcactgtggtgtctatgaccaagaaataacagaacgccaggattagaatatcgagaaattctataaacatataaaatgtgaacattgtattatgccagaatttgaataataacagcagcatctttggcctaaggatatttcttgggtatgctgaccattaagagttaataatacactgcttgggttatggaaatatgcccagactagcttggagattttgttttgatctagtgtctttgtagccacaaaagctaccagcttgagaacaggctgttatgtgcctctagatccttaaaaaatgggttatggggttaatgaggaaaaatgattataaaagataactttttttatcaatgatgtcaaaacttgagggaaaatgattagaaatgataactgttctatcataatttattaatgatgagtaaagatgagcagaaggaagagaaacacatgcgcaaaaaatgacatgatctatgttatggaacaacatgaatgtatccctgcttactaaattctgtataaataaagacacactctggctgctagtcagtcaggctgcaatgttcttctgaccatcacggcctggctccctctctcccttgcctactccttacatcccctgctgggacacgagtctccatctgagaagctagaacatagatagatagatagatagatagatagatagatagatagacagatgatacagagaaaccataaaataccagttttaggaaaatatagataggaaaataaaaatatcaatctaacttatatatccattcaaagttatagaaagtatataaaaactacaaaatgctaattcttaaaataataagtcaaataaaatgtaaaaattaagacaataacaactattagtaaataatacatgaattttaatgagtttgaaatagttacaattaggagttacatatagtccaattgtcaatgtttcttcttttctaaaagttattaaaactgcccagagcatcaaaattggagtttattatcataaatttaggaaagtgaacatctaaaacctacataaattatcccatgagattgttctaaaaatgaaggttgcatcaagctaaatttgtgaaaagctgcagaaaaggtatcaaagaataggacaccattaccacaggtgtaagaatatagagatgttttgaagtctaacatatatgtaagttattaacatgggacttactacatcacttaacaactgtaacttctaagattcacagagaaaaaggacaaaggacaaattgcatataaacaaatcaaattcattacaagagtttgttctgtaccactctggaacctacagaagaggacactcaagcttcagcacaaatgcccaagcaatcccacaagttagaatcaacttgtatcctcacaaccagaatacaccggttgaggtaaaccatttttgtttttgtttgctttggacatctttcatctcatttgaatgtagcttatttctgacatctacagtgctaagaatgtgcaatgtatcttccagtgatagccttcctcatcagagtcctgaacttatatcctggacctgccatggatgtggcaaagtctgttgcagaaagatgtctggttacactctaccaaggatcagattaaatacattagattggggatcttgcttttaccttatattcttaccaaattctgcatgtggcaaatattttctttttatttatttttttatttttatatttatttatttatttatttttggttttttgagacagggtttctctgtggctttggaggctgtcctggaactagctcttgtagaccaggctggtctcgtactcacagagatccgcctgcctctgcctcccgagtgctgggattaaaggtgtgcaccaccaacgcccggcggcaaatattttcttatctgatacactgtaaatataacatgttggtgatgaagggaaagaaaaaggctgttggacaggggcattaagaagaaatgaattgctttcagttttttttttttttgataacttgagggtttaccgaatacattactagtatcttatataatggccagctctggccttgagaaagcctttgtctctttccttggcctcattgtctgcagtctacatggcttctcaaaatgccctggttcaaataaagttatcctcaaccctcctaatccaacttgtgtcttgagagttggcctcatttttgtctcaatagacccctaggaataccatatccaataaacaaaaatccattttttccaaagcccagacctaccttcttgtcacttgcagtacctcttgtacatctgataaggatgaggatgatgctttggaagtgccccaggtttctggtcaaaatacagagagacctctccacgctatacacataactccacttagatttgcatgttccttctagatgttttgcaaatcctaaagattgtacagagaatttctgaggaatacaactgactaggtcctttagttcctgtcggaagcactaacagatttttatgtcccttgtatgggtgtgtgtgtgtctattgttaaatttgctgaaaaagcagacgctcccctttcagtctttctcatgaaacaacagatgtggacatcagtgcaaggatgtaattacaaagatgtaattaatggcactaatttaatttcacacatttttatgttgtcctgtcttcctggtaaattttctatacagaatatgctattaacatgaaattctgctgctggagtttaaacatgaatgtccataaaatagcaagaaattggttccctaacaataattacacatttctctaagtcaaagaagtgttagatgtcagagaaagaagtctgtgtgtatgtagtttttactaagacaaactcttctgcaatgctttaagaacttttcgttttcctgaatcaagattttccaggaaattggaaaaaaatttatctgatatttaggagtgagctagtccattttacactggaataacaaaacatcattagcgggataatttataaagacacaggtttattaagctcaaaatttctgaggttcagatgcatggttcagcatctactagctcctgctaagagtcttctagttggattgttgcagatggcataatggttagaaggagtaggtgtgagaggttaagatgacacggaaagatggaaagtaaaagaaaagatctaggtttcttttgataccgcatgggaactaatcaggatcctatgagaattgcattcatctcttctggggtcaacacttccagtgacataacaattcatccctatgtcctacttcttagagttcccatacttcagaacttccatactggggacaaagcctccaatacatgaaactcagggtatgttgttggtcatctttctactgctgtggcaggacataagaaaagcacatgaaaagaagagggatttcttttggctcacagtgtctgtggtttcagtccaaaataatctgtttctatcattttggggctaagaaaaggcacaatatcatggcagcataagactttgtcagaggaggctgctcacctcatggcagatagaaaggaaaatgcaggtaaggggacctatagacagtacatctttccatgctttcaatgttctacttaaaccaaacaagaccccagcctaatatctcatttagtcatgaatttgtcagtggctgaagctagtggtgatattaccatctttatgatccaatcacctcccaaggctctgctgctgtagtgtggatcaaggtttcaatgcgtgagtatttggggacacttcctatgccaaccacaacagcgaacaaactcaatccaaattatggcaaagaataaagcaaagcagtgtttgattttcattactaaatattttctgagagaaaaatgatcatgaaccaaataagatgatatgtacccatatataaaaggtgaaaaatgatgcccccagggagttcataagaaacctggaaatacagaaaggtcaccacattagtagaacccaggttaattaattctcttcacaagaatctagagagttgacgtaagaatcagtgacccacaccttgggaattcagaggagagttcctggagatgaagatatttaactagaggctttaatgattcagatggtgggtagcttccagctgggagagtgagggagctattctatcaactccagactaaaagaatcaataaaatgaagaaaagtcaaaagttgaaagggatcaaagtacatcagagaaattgaaagaacatagaatcagaatagaacaggagtaggcagagatggctcagtggctaagagagcttgccattcttcagatgacctaagttcagttcccacactttgtaagcaataataatcatcattctgccaatttcttcaacacttcccttttatcaagtcatgtttttggggtattgaattttatcttgtgacacttaagcaggaaaaaataaattccagaagatgataagcaaacacaagcaatttttaatctctaaatttagcagcaagatataattttggggtgtcatttcctctgaattatacacatggtatcatgagtgtataattcatgtacagtatattcatgaatccaaatactactctgcaccagccacttaatatactgtgctctttagagttctcttttcatagaaacttgtaaaaggtaattaaagaaaagcttggagatgggaatggtgtgatggtgaatgttttaaatcccagcaatccagaagcagagactagcagatctctgagtttgaggccagcctggtctatagagcaagttttaggacagccaactttaggcagtgaaagacagaaagctggttaagatgtaattgaatgaggggattgtgtttcagccccagtaaaaatcagaacttggcagctttggtcacatggttctggctttagagttaaggataaaagaaaggagttgtagaataaagccacagaggccaggcctttgttaggggtgtccatgaatggaggcctagtagagaggccattgtgtgaatctgtgaagttgaagtctggattgcattgaagaacccaagatgttagagatgtcagagtcatggaatacctgccaatgacagctgctaacagggagtggaaccaggccacgagaaagaaatgtgttgtagtcaaacctgaatggtgttggagatctgaagaatgttttgacatcagacatggggatgcaatgtttggagtttgcccagctggcttctggtcttgttttggtccagtatatcctcactgtgctcccttcccactcatggattttattaattattatttataatatccacactgcttgcagatcagtacaattgcaagagaaatcttaataaagttcttcagagaaagaaaaagttattttagaactatacataatcatttctcactttctcccaagcccaaaatatgaaaagcagcagtgaaatagaaacattgcatgtgaattcatacaaacagctgttagggaaggctagaatattagatgacagtccagtgaccctgcccatccctggtaactgagagaattaatcagtctgcatagcccatcttgttggactctcacaagtgggcacaactgatctcatgaatgtggcactcatttgggtcagtgggtggtgcctcacaagagtattttaagaaaaaggaatggaaattagagtattgctttaacttcagcacagtgactgcaccttaatctacagctatttcagccagcaatttatcacaatcaccagcctgcttctctagcatcagcctggccactcagaccaaagcctggtgggaattcagctcctgcaggtaccatcaatgttgctgctgctaaaggtagctttaactaaatctctattgttcaatttattcatacacacatgtaaaatctaaaaaataaagtgaatctttgaaagaatagaaattagattgcggctactcctgcctccactcagggcagaggtgagctgcttcggcccctgccttgggcccaactttcacctggccactctgggaactcctgtcctggggtctgcaggcaggtagactcagcccctgaggaccaagcaacccagattctgctgacatccctgtgctagtcccactcccacccaccttaagacctatcagagtatcagaccctcttgcacccaccggaagagaaccttggacccatatacaccagaaaaggaggagacaccacctgcacccactggaaagagatgggaacacatccaacaacagaaaaaccaatatgatgccagcagagtctaggaactctatgccagcaagacctgaatatcccaacacagatgaagcagaagagagcaaacttaaaaacaacttcatgcagatgatagagaccctaagagaggaaatgagaaaatacttcagagaaatggaagaaaaaacaaaccaaaagatgcaagaaatcaacaaatcttttaaggaaagccaagaaaatacaatcaaatagctgaaggaaacatttcagacagttcaagacctgaaaactgaaatagagacaataaagaaaacacaaactgagggaatgctggaaaaagaaaagctgagtaaactaccaggaaccacagatgcaagcataaccaacagaatacaggagatggaagacagaatctcagacgctgaagataaagtagaggaaatagattcatcaaccaaagaaaaccttaagtccaacaaatccttgacacaaattatccaggaaatgtgggacaccatgaaaagaccaaacctaaggataataggtatggaagaaagtgaagaaacccaactcaaaggtgcagaaaacatattcaacaaaatcatagaagaaaactttcccaacctaaagaaagacatgccaatgaatgtacaagaagcctacagaacaccaaacagagtgaatcacaaaaatacagtcccctcgtcacataataattaaaacacaaaacatacagaataaagaaagaatattaagagcagcaaaggaaaaaggtcaagtaacatgtaaaggcaaacctataagaactatatctgacttttccatggaaactctgaaagccagaaggacaaggatagatattctaccaactctaagagaacatgtatgacagcccagactactatacccagcaaagctttcaatcactataaatggagaaaacaagatattccatgacaaaaccagatttaaacaatatgtaaccactaatacagtcctacagaaaggactggaaggaaaactccaacctaaggatgttaactacactcacaaaaacataggcaatagataatcccactttaccaaaagccaaaagacaaagcagggtaaatccatatacaaaccactaccaacaacaaatcaaaaacaaacaagaataagcactcaaaggttcctaatttccctcaatattaatggtcttatttcgcctataaaaagacatagtctaacagaatggatacgaagacagaatccatccttctgctgcatacaagaaacacacctcaacttgaaagacagatattacctcagagtaaagggttgggataagatattctaatcaaatggacccaagaaacaagctggggtagctatcctagtatctaacaaattagacttcaaactaaaatcaatcaaaagagatgaagaaggtcatttcatactcatcacaggaaaaatccatcaggaagaagtctcaattctaaacgtctattccccaaatacaaaggaaccaacattcgtaaaagaaacattactaaaactcaaattacacataagacctcacacagttatagtgggagacttcaacatcccactctaaccactgggcaggaccaccagatagaaacttaaaaaagagacaaaggaactaacagaagttatgacccaattgggcttaacagacatctatagaacattccatccaaacacaaaagaatataccttcttttcagcacaatatggagccttctctaaaatcaaccacatactcggtaacatagaaaacctcaacaggtacaaaaaaattgaaataatctcctgtgtcttatcagacaactatgctttaaagttagaattcaacaacaacacaaattgcagaaaacctaccaaatcatggaaattgaacaacacacaattgcaccattcctgggtcaaggaagaaataaaggaagaaattaaatacttcctagaattcaatgcaaattaagacacaacatacccaaacttatggggcactttgaaagcagtactaagaggaaagttcatagctctaagtgctcacatgaaactagagaatagtcataccagaaagttgacatcaaaactgaaatgtctagaacgaacagaagcaaattcaccccagaggagtagatgccaggaaataatcaaactgaggacagaaatcaatgaagtcgaaacaaagaaaacaattaaaagaatcaatgcaacaaagagttggttctccagaaaatcaacaagatagacaaacctttatccaaactaaccaaaaggcagagagaacatgcaaattaacaaaatcagaaatgaaaagggggacataacaatggacactgaggaaatccagagaatcttcagatcagactctgaaaacctgtactccacaaaattcaaaaatttaaaggaaattggacattattctggatagatataacttaccaaaattgaatcaagagcagataagcagcttaaacagacctatagcccctaaggaaatagagcagtcatcaaaatctcccaacccaaaaaagcccagggccagttggcttcagtgcagaattctaccagaaattcaaagaagagctaataccaatactcctcaaattgttccatacaatagaagcagagggttcattgccaaaccctttttaggaggctacaattaccttggtacccaagccacataaagacacaactaagaaagagatctatagaccaatacccctcatgaacattgatgcaaaaatactcaataaaatactggcaaaccaaatctaagaacatatcagaaaaatcgtacaacatgatcaaataggcttcattcctgggatgcagggttggttcaacatatgaaaatccatcagtgtgatccaccatataaacaaactgaaaaagaaaaaccacatgatcatctcattagatgctgaaaaagcctttgacaaaatccagcatcccttcatgataaaggtcctggagaaatcaggaataacaggaacatacctgaacataataaaaacaatatacagtaaaccaacagctagtaccaaataaatggagagaaactcaaagcgattcctctaaaatcagaaacaaaacaaggctgtccactctctccatatcgcttcaatattttccttgaagttctagctagagcaataagacaacaagaggagatcaaggggatacaaattggaaaggaagaggtcaaactttcactgtttgcagatgatataatagtttacatgactgacccaataaactcgaccagggaactcctacagctgataaacaccttcagcaaagtggcagaatacaagattaactaaaaaaaagtcagtagccctactatatacagatgataaatgggctgagaaagaaatcagagaaacatcatcctttacaatagccacaaactacataaaatatcttgggataatgctaaccaaacaagtgaaagacttgtatagcaagaaccttgagtctttaaagaaagaaattaaagaagataccagaaaatggaaagatctcccatctctttcataggtaggatcaacatagtaaaaatggcaatcttgccaaaaacaatctacaaattcaatgcaatcctcatcaaaatactgacacaatttttcacagaccttgaaagaataattctcaactttatatggaaaaacaaaagacccaggatagccaaaacaaccctgtacagtaaaggaacttctggaggcatcatcatccctgacttcaaactttattatagagttatagtcctgaaaacaagcttggtattggcacaaacataaacaagtagacaaatggaatcaaattgaaaatcctgttattaacccacatatttacgagcacctaatttttgacaaaaagctaaatatatacaatggaatagagaaagcatcttcaacaaatggtgctggtataaccggatgctggcatgtagaagactgcagatggatccatgtctatggttatgcacaaaattaaatccaaatggatgaaagaccgcaatataaatctagccacactgaacctcttagaagagaaagtgggaagtacccttgaatgaattggtataggagacagcttcctgaacattacacctgtagcacaggcactgaaatcaacaattaataaacgggacctcctgaaactgagaagcttctgtaaggcaaaggacacagtcaacaagaaaaaaaacagcagtccacagaatgggaaaagatattcaacagccctggacagagggctgatctccaaaatttacaaagaactcaagaagctagtttccaaaacaccaaacaatccaattaaaaattggggtacagaactaaacagacaattctcaatataaaatggctgaaagacacataagaaagtgatcaacatccttagctattagggaaatgcaaatgacaacaactctgagttaccatcttactcatgtcagaatggctaaaatgaaaacaccaatgataacttaagctggaaaggatgtggagaaaggggaacacttctccactgctggtgggagtgcaaacttgtacagccactttcaaaatcagtatggcaattcctcaggaaaatggatcagtctaccacaagatccagcaattccactattagacatatacccaaaagaatcatgttcatacaacaaggacatctgttcaactatgttcatagcagcattttttgtaatagccagaacttggaagcaacctagatgcccctcaactgaagaatggatagagaaaatgtggtacatttacacaaaggagtactactcagcagaaaaaaaaaaacaatggaatcttgaaatttgcaggaaaatagatggaacgagaagaaaccatcctgaatgagataaaccggtcacaaaaattacaaacagggtatgtactcactcagatatggattttagacatagagcaaagtcttaacagcttgcaattttcaccaacacagaagcaaggacacaaggaggaccctaagagaaacatacatgttccccagtataagggtaaagggagaagatctcctgagctaattgggtgcatgggaggaggggagaaggagtcaggagaaagaggagagaagtggaggggagaggaggacatgagggagcaggacgatcgagttagaggaagaatagaggagagcaagacaagagatcccataacagggagccattataggtttaaagagaaatctggcactagggaaatgtccagagatctgcaaggatcacatcaactaacaatctaagcaatagtggagaggccaccttaaatgcccttccccagtaattagattgatgactaccttatatgccatcctagagccttcatccagtagctgatggaagcagaagcagacacccacagctaaacactgaaatatactcctggaatacagttgcagagagggaagagtgatgagcaaaaggttcaagaccaggctggtgaaactcacagaaacagctgacctgaacaagggggaactcatggaccctagactgataaaccagcattggactaattcagacttcctgaacgtggttgtcagttaaggagcctggtcaatctatggggcctctggtcgtcgatcagtatatatccctagtacacgtacagtatccctgggactttgggagcccatttcacatagagggatgctctctcagcctagacacacggggaggacctaggccctgctccaaatgatatgagagactttaaagattccccatggaaggcctcaccctccctggggagcagaaggaggatgggttagggggtcagtggggggcaggggaggaggggaaggagagggaactgagattgacatgtaaaacaagcttgtttctaatttaaatgaaaaacaatcataagcttgttaaatgtgagcccaggggctaaaaaataatggtcagttaaaattaatcacaagtagagggctggatagagttcctaaaaggaaaattttgtggacattttagttaaactcccttcttctggtgctggtgattcctcaaagagccacagtgatggcctgtgatgcctcaggtcccagatttgatcctcagcaccacaaacgtacttattctcccaagagtgtaacatcagacagagcaacttcagggatcaccaagtggtcatcaataggaaaattaaattaaagtaacacagtgtgcggtgctttcaaaacaagcaaaaacgatctctgccctgcaaagtcttccacttacttgttgggggcgggagcggggatgaaccgacaggaaagtgaagtgaattgaatatacatgctattaaaagagaatactacatatggaataagataaaaatcactacaagagggttggagagatggctcagaggttaagagcaccactgacttctcttccagaggtcctgagttcaattgccagcaaccacatggtggctcacaaccatctgtaatgagatctggtgctctctgctggtgtgcagatatacatggaagcagaatgttgtatacataataaataaataaaatctttaaaaaatcactacaagaaaacatcaaataaacataaatagaattatattatatcactcatcagtaccaataactgagacagtgaatctgaaatacaaatccaaacaatgcctcatggatgagaggtccaaagaaaggcagtttacatgtgaatatcgatttttttcagcaccacccgtgttcagcacatacttcttgcatctttatcatatagcaaagggctctaactacacacactcttgttgggtcgtctattttcctctgttgttctacttgtctgtttttgtgccattatcaagctgtttttactgccatggaactatctcttgaaatctggaatggcaattccttctagaattgttcctttttgctcacgattgctttgtcttttccatttccgtacgaattttaagatcttttctatttacatgaagaatgtcatgaggggttttgatgaaggtttcattgattttgtccatttgttttggtaggatggttattaattccaccaatacatgaacatggaaggtttttccatctttcggtatcttttccagtctcttcagatattgaagggcatcattctagaaaattttcacccccattgttaggtttatccctagatctcatttttaaagctagaagtatttccatgatctttcttggcaactttgttattagtgtttagaaaagcccctggtgttcatgagttaattttgtgtcctgtcagtttgctgaaaatgagtaagtgtctgggggaggttgtgttttcatattcatttggttccatggagttttcattttctttcttacccattctttctgtaatgctttgttcaatctccaatgagttcatgcaattatttgagacccatctgctgttgattttcagttttactgtattgtggtaagatagaatgtatggatttatttaaacttttctgcttgtttcttttgtgtcccagtttatggtctattttacagaagctttgatgaactgctgcatagaatgtgtattctttggtattttggtggaatatcctgtaaacgtctgttttaagtccattgaatatatggtgtatggtggcattaaattcttctgtgtctctgcctgcttgttattcagtctgttggagaaagtgggtattcaaatcacctactactactgagttggtgttaatctgggtcttgaagtctgttagttctattaaaccaaagtcaattggttgaataatatatttcttatatctttgccttgtataagtacgtatacatattcaatttgctaactcactaaaacaactaacttactgaagagctgctggaagacaggacttcaatgtggggagttcaggatttatcatgattctatatatagaatgcagaagaaataacactaaattttttttatcaactcactaaatttgcaatttaaaactgcttgtattttatttatcaatatgtggaatttattttttcctgcttcaatgtcacaagataaaatgcaatacacccaaaacatgactggataaacttcccttttcccaacaagtttacccaggaaggaattatttgcctgagacagttcctattgtctatgaagctcagtatttaattgaagtaagattaaattttcctaaaaattatacttccctaatgccttagtatatttagggagggaggtcttttgttttctttgaaaacgtttatatttgttcaatttgacctgaaaagagtttttcttaatgaacttaatgtctttaattgaggaaagtggttacagagctataattagcacagaggttggtgaactaaggctagaggtcctaagtccaaagtcactgttgcttttctgttaaaagagcatcttccacacgtgaaattaccctctgcaacttctatttccacagaacagtactgctgctggctttggtcaaggaggctttttatctttgttgtttgttgtttgttgtttgttgcaggggtcagtggtgactgcagagacttctaactgttcaaagcacagagcataaaagatggctgaatctccagccacaaacaggacatctataatgcccactccaaggctcaggaaacattgtgaaagatggaacagaaaggatacaagagccagaagaagagagagtagttgcatggaatgctgacttctaggcagccagggctgttatactcttgaactcactgctggtgttgctacctctgtaaaactcttacaaggttgagcacaccaatatcctgtcatggaggggaagggggaaagttaagggtccccacatcactctaaggatttatatgtagatattggatgatgagggagggagagacattttcttcagtgatatagccactggtatgttgcaatgctcctataaacaaactcccactgtacttctcatcaaactcattaggtcacacaacacacatacacaaaaggcatggaagttaaaagagctaattgaggataagaagacgaagaagaagaagaagaagaagaagaagaagaagaagaagaagaagaagaagaagaagaagaagaagaagaaggaagaagggaataagcaggagtgaaagagggataaaagagggtgaatattattgaaagtcaccatgcatatgtatgaaaacttctgaatgaaacccactaatacataattaatatatgctaataaaacattaaaatgaaaaatgataacatttcttgttacatatggttgtacaaagcttgttgacttacactagcttggaaaccataacgtttattttacatgtaagtacatgtaaatcctagggtctgaaacagttgtttagaattttaagaatgttttcttagaaatatataaacagtgtggtggtgcacagtcttgatcccagcactcaggagggagagacaggtagatatctgtaacttccagtccagccagagctgcagagggagaccctgtcccccacaaaaaaaaaaaaaaacaaccaacaacaaactccaaagcagaacaaaaatagtatgtagcatacagcagttttctttgttatgtatttactgctggttggactattttttgtcttatctgtagaaagtgcacacaacaaaaaatgctttatatttagaacaagaagtcagctgttattctggtaaataagcaattaacacagaaaaatatattttgctaaaagaatgctttttcccaaaagacccttcctagatttaaaacacgaaaaagcagttactagatatactgccaccacttttcatgactagcagtttctaatacattatttccatcagtttttctcttctaatcttttatagcagaggctctgagatttcccccttctctgtaactaaactggaatgtcattgctaagcgccattatcactcatcagtcagtcaagagatatgtcctaatgagattgctaattgtggaattataaaaataaatataatacaattcttattttcagaggcactaatgaattattaagaaaagcatttaaaaatcatggtcttagcctttttaaggttatactaatcttctttcccccaaaatccagttaaacaacataagacacaggaagaaaattgttaagttcaaaaaattctaaaacaacatgaaaggaaatgtcactattccttcttttgttgttgttgtgtgattagaataaaaaagggccaatgggtttgttggttacaacaacaaatcattttatctggttgaaatgctgcgttaaggaatgggaaaggggaattttatctgagggaacaaaaaacagtgctattgttcacagcgtatgcaaaaatcacaaacttgtaataaacaaacatagctgtaccatttaatgttaagaaacattgcaaggtgacactctgtcctaaacactagagaacctttacaaatctaaagaccagtgggccaatagtgcaaaacagaattaagaaataattttaaaatggttactagttcatcaactggtaacatcaacaatacaaacagcatgagagaaatacgtcagaggcaatataggatgggattttcaatgtcacaccaagaaaagtatgaacaaggtaaatgttattttgcaaccattaaattggctgctaaaatgacagctcttcaaaaataatgctaacaccagaacaactgaatggggatggagatttgttcaatctcctatcaaaagtatttggaaataacataggtttataaaatctgtttatcagctgacttgagcaagtgggagctcactgatttcagattgacagctggagaaactgcataagtccaaacttggtcctgacccaaatgatgtgacagatgttgatgatccccaatgggaggcctcactctctctgaggagtggatgggggtgggtgggaagatggtgggggtagtgggagggcaggagggagagggaactgggattggtatgtaaaataagattgtttttaatttaaatttaataaataaataaataaaaggtgtttaaacacagtcaataagtctaaagccaagtgtaaagccatattttatcattttttgtagacacatggaaaataaaagctttgtgtaatgtaaaacagacaccacagtttcctcaaaaatagttatttaaactgtaaaattatacagctttgaaaataaagaaataactattaaatccaacagtattgtttatttggaaacattggcataatgttaccaatactcaataagaatagctcattagctttcagtgctaaaaatgtcaataaaagatacattagtgtgataacctatatcagatactagtctatactctggcagttacagaaatctaaggtctattcccataattaatcaatgtgtaatttttctatagatcaacttgaatgtccttgtgtttcggtcccaatggtaagcctcaaaatacacctttctttttaagcagcatatagttgtcttaggtcataaatggatcattgtttctagtttagaaaaggggatttccagaagaaaagattttccttggttttcttagttgtctctagtcttatgtttctttataatgcataagtcataggaaacactgagtttttaaaaagtgactttaaccatggcaatcagctctctatcgatcaggcaataatttattggccatagttgatcacttttaatatataaaactaatgaattttatttatacacacatacatacatgcacttacacacacacacacacacatacacacacacacacacacacacacacacaaacttatataagttattccacccaacttcagatagctaacagtaaacaagtttgaaaccaactgagaatataaaactgactagattggaggcctgaaaaagaaatgggttatctttgcatatcccaaactaagtcccccaaactaagtgtctttatttggatatgtctatgtatgggagaatgtgctatgtctaaatgtctaataagtcagtgactagtgacccgtgttttctaagaatagtagattaacatcctggcaggcctagggtggagctagtctttactgaaaaaggaaaatacaaaactacaaggaaggaagactctcttgagtggggaaaaagtaaaaatgattgatggccctgtttgcacatagaaagatctctatttctgagtgagtattgaaaacaacttagtgttagttatgaaacatgagcttattaaatttatggaaagaaggccaaaaggacatgcaaccaaagcatgcaaaatcaatcgcttctaattattcagaagaaaaagtttactggagaaaaaattacacaagtatattgggagaatgaggaaaacaaagtgatatgcgacttttctgggataggggtgaaagaggaaggattagttatctccaatagaaaggagttgactaagtatcacataaaacccccaaataaaaaacattgctatagtcattcacttagaatatataaacacagaaaacaatgaaaaatttagaagtctgttttagggggaaggaagtatattcaggaactataaaaaatattaatgactgaccctgcccaggagagattagatggaagttatgcttttctgaactattcagatataattttaaaatttcttccttaggaggttttatatagtcattaacagtgttagtaaattcatgtatattaactaataataacttagacacaggcatatcttgtgcattttccaggaataaattgagacctgctgttttgtaagtgtttcctcttagcaggaacccaatgttgtttgatttcagagtctgtagcaaggttattactatttggttcttttacttcctttaaaatttctgtattataattataatttggaaatagctctgagctagctgctcactacagcaccctacaggtccacatgaacttcacgcattcacaagccactcaacacaaagtgaaggttgtgagaaagacaacaagaacttgatcacttgaaaaaaatgcagaaatgaaaaaaatgaaaaaaatgaaaaatgaaaaaatgaaaaaaatatatatatcatgaaattacttcatgcaacaaatttggttttccatatttttggtgttggttttcttaaatgttaggtgtctgttcatattttcctgtgatgtttctcttattgtgtcatagggtgtgctacttgggcctacatgtggggactgtgaggaattgtagacaggaagtgtctgggagaaaggcccctgcttgccccctccccctttggtcttcctccttggaatcccagctcatgaggtgaactgaggactctattttgggaactaatcccataattcgcctctcccaatttctgcccttctctttttctttttccctttttattaaacataggtccttttctcatacaatagtcctgattacagcgccccccagccccttgttcctcagtataccactcagattgaaatgactccaattactttttattcagccctagattccatatcctgtgtactcacctggagcagggctggaactctactgtgaaaatagttctcacagtttgatctcagaataaaatgccttgttggtgctttcttaaagagagacaaagaagatacctaactttatctgacatacttttaaaaataaattaccttaacacttgccaggggctcttatgcattatccgggttcttttcctctctgatattgaacttgtgcttttgcagtatttgctgacatttctatagtaggagatagtatttatgtttctccttaaaatttcatttctcctgttttctatatccatcgttatgagaaatgatgccagtgaagcccaccctaattttttattgctttgaattttcttgtgtgtctgcacacaattttcttgtgtgtcatgtgcgtgagagtactcaagaagaccagaagagggtgttggatgtcctgggtctagagttacaggcagtggtgagcctgtagtgagtcctgggatccaaactcaggacctctgaaagaggaggaagcatgctaattcgggtcaattctccagcctctgcttcttcatttcacaacagaagaaatggtgtctagatcccaacctcttatagtaatccttaggaggatctgtcttcaaatactgtgagtgtatgatgagtctgtgtgtgtgtggggggggtgtaagagagagaaatgtgtgtatatgtgagtgtatgacgagtgtgtgtgtaatgtgtgattttgtgtgtgagtgtatgatgtgtgtgtgtgtgagtgtatggcgtgtgtatctgtaaatgtgtgtgtgtgaatggattgcgtgtatatgtgtaaatgtattatgtgcacgaatatatgatgtgtgtgtgtgcacacacaagtatacacacatgtgcacagatgctatagcatgtgtcaagaggtcagagggcaacctcagtctttaccttctactttgtgatagaattctaattccaaatgggtccaatgacctgggacagatgtgtgaagtcagtgcagtgaagaaaatatgatcacctgtttcaaaaaaagtgccccagatagcctgggctgttttaacttacataatttcaatggtttgcatgaagagttttacaattaaatttgtttccttatgtatataataatagttacaataactgccagtttattcctttatcttatttccttctgtccccctgctttcccattacctatttgatacatagctctaatattagaagcataagcagtgttgcaagcaacaaaagaagtttctaagtaggcacacctacaagtagaatagtgtgccctgttggcagcacttgtggttacagagtcaagcaaagtgaaagaattttgcctatagtggttaatgtttacctctaatcaaatctaagctctcacaattaactcatcagccaaggctatatcagtgcttcccgtattctgtattgctctatatcctattgggatataccagttttttcccctatcatcttgtaagcaacataacttaaaagcttattcttaatagttggtactgcttgtgccttgttctcatgcccccttccccttaacttcctacagtattagcacagctattaataataagggtgctgtataagtactgcacattaaacgatagcaccactggagctccaactatggggcctctagcagtggaacttgtatttattcctagtgcacgaatgggctttgggagcccattcactatagagggatgctctctcagcctagatgcatgggggaaggcaaactttgatgatccccatgggaggcctcacactccctgaggaatgggtggagattggatgggggattggtgggagaagtaggaggacaggagggagagggaactggcgttggtatgtaaaatagaattgctttcactttaaataaaaattaattaaaaaataatgagggtgctgtgcgtttctaggattctgcttcatttccttctgtgaatgaactgttgatgatctatttattaacatttctcctagactcttgttactaaaatcattctctctagaatggctatgcaaatttgttatattttcatgagcttctgtgactctttcaggctagtcacaaggtgtgctagaaaggcgacatcctgttcttgagatgcctgaattcattgtcacacctgaaacatcaaagacttttggggctgaatcaggtccattgtatacatattttttattctttttgtaattaagtttttatttcaaattaggaacaagcttgcttcacatgtcaatccttctctctcccctctccccaaccttcccccatacaccctccactccccaggcagggtagggccctcaacagggctcctcaaagtccaccacatcatcatgggtcccccatgtgtcaaggccaagagtgtagggagacaccctagccccgcccaatagtcctgggacaggtaccaggtggacccgggactcgcccataagggcgtggtgaaggaaagccggggtgacgtaagggagcttcttaaggagctgcacgtggggaccttggccccttttgttctggccgcgcttgctgggttctataacctagctcttgcctgtgttttgccttggtgtcttcttgaataaagagacattaatcttacaaaaagctaaatagtgaaatggaaaatggcccagaccagagatggagtgtgttcatgatcttttctacagaggaataggtgtctggggaagtgtactttgttggctgttagagggtttggctggcctttgttcctggtttgggggggtatgtgtgtggggtgttaaatccttggaatttcctgagaggatggagtgtcactgttatttgtctgccttgtggatcacagtggaatttttgtcaagagaggggatgacccaggatggcagctggccagaatgcagtctagatcaaggtttatccgatctacatgcgcatccaatacaagagtgcatcccttcacatgggatgggatctccaagtcccttcttacaccaggaaaaaatactaatctactaccaggggccccctagagttcggaggcctcctcattgaaatccatgttcagaggtctgattcagtcctgtgctggcctcccagacagcagtctggggtccatgtgctcccccttgttcaggccagctgtttctgtgggtttcaccagcctggtaccgacccctttatcttcattcctccctctctgcaactaggttccagagttcagttaagtgtatatctgtggatgtctgcctctgcttccattggccactggatgagggctcgaggatggcacaaaaagtagtcatcattctcgtcataggggaagggcatttaggttatcttctccaccattgcctagattgtaagttcatgccatccttgtgagtctctggaaatctccctagtgccagatctctctttggacctacaatggctccctctgatatgatatctctcatcctgctctcctctatttttcccccaactcaacatttctgctcctccatttcctcctctcccctcctcttctcctcctctcattctggcagctccctgtcccctatcctcatgctcccaattagctcaggagttcctgccccttcccattctctggggtccatgcatttattccttagagctaaaaaagtgaaactagaggcagccagcaatatgatttatataaagaaagcaagggggagcaggtagcaatatgctcctggagtcataaccagaattatgcaggaaactatctattggccttgccaaaataggtcagattctccagtgcctttctacaaggagaatttgttagtgctattctcacaccttgtcccctgaagaagtcacatggctccagggaaccttgtttgaggtcaggtctcttatttgtcactatgtctaataagatgcctgactcatgagcttccaggaagtctattgtttgccccctcttgcaatcttgttttaggattactggtgtccttctgactctatgtggtttctgggaatctgaactcaggtctgcacatggcaatcactttactcactaagccatctctatagtccacaagcttaaaatacacaatcttcttccacagcctcctgagtgttgggattacaggactgagccaccatgcctggtttgcacttgcttttgaaaataaactatatgtttcatactggttttagtttttaacaacagattcaaatatttacaattggaataatgatgctacagacctaatgtgtaacctatctactccttacagaaactttgccaactcttgacctatctgttcagatcacaggctgctgagtcagggaattatctgccgtcttgctgttctgatcctgaaaccatgcctgaaacacctgagctactgaatctattgaaaggaagaagaaagacaacaaaacaatgagtgagagttttctcaagatgctccgtgtctgtatttctcatatgctgaggacttgatttattagcttgttcacaacagagggaccatctctaattggtcatcaatctgttctctagttccaagttaagcactacaggacttttggactttgactctccagcatcttgcttctacttatgaggatgctgtacttacttgtacccctgagcagaccaaggtaatctgcttgtaacagctgatgaaaaacccaaatcaaaaccaaccaagcaaacaaacaaaaaaccaaatcattctgtccaaaagctagaatctcctgtgctgtgcagctggaccatctatagctcgtattctggggcttggttggaaggccaacttgagagactgttgtctttcttcagtcaatcaaaggtggggtcatattttagttacacatagtttcaggtctcaataggatcaagatgataatcatttggagagagttttcctccatcaccaagtttagagtaccgtcgcaatcaatttctctgctggtatgagagcagagtgagcttgggggttagaatctgtgaaaaagtgaaaggacaagtgacctttaggaggtcaaaattgtccaggggttagactatgtcaagaatcacatttccagaccctggtcagggcttttcctctttggccctagtgatctggaggatacgtttggaaactgaacctccatttctcatattcctttgtataaatttattttagggtagggatgctttatggtcctttaaagtacactgaaatcctgtgtccctctctgtccttggacgcaaagtgacctgtgggaaccctggaagggttagcattggcctgggaagatgatttgagcattttttctattgcatggtaatcaactacacaaagctaggatcttaaaaataaaacccacccacatctttataatcttctcagtctctgtgtgttaagatagggacagtgtgcctgagtcctgtcttgtaagtcttaggctgtgcttgtatagttggctggattgtggtgtcctatggagattctggtcgtcttccatgttcatatggccatattcatttcctgttaaactgaatgaccgtgtatttccttgagaaaatagagaggaaaagatgtcaaattctttgaggctttttgaattggctcatgtaattattccaggtttatgtataatttgtattatgtatatgtatataatttatattatgtttatgtgtaattatgcattttgtgtaataatatcctttatgatagaattaaagtcaaccaatcaatgtgatgctcaatcttaattgtcaatttaattggatctgggaccaaataagagagacattggagggcagactttgagggaatgtcaaaggagagttaattgaggacagaagaccctccctaattgtgggtaggtaatacctttctttctacagcaatccagaaataaaggggtccaagaaggaggtcgtgctatctgctggatgcttttgtgcatctgttctgtcattgttgcggttgctcctattattggctaccaacagcacccaaattctttagccttctaacatagcataaagacgagcaggtctccaggaatcctccaagctcttagtgcctgtttgggattgtggagatatccagtttcatgtactgaacagtctctccagctctgttcaactacctaccctatatcatttaaatcaatctagtaaattccctttgtaatacatatcctttctctctgttctgttcctttagagaattctgactgagacactgaccatctcacagaagtgttatcccattttatatacaggtctgcctcacacaaatgcagagaaaatatttatgtggatccttttgagtgccatcttgacatcaagggtggcatgatggctaaagaaaagctgctttttccaggattcctttttcaaaagacatcacctcatagaacattccatgatgctgagaatcccagaggtttccaggttttactccaacatcatgttacaacaaatttctctgggctgctgaagaaacatcagaaatccaactgctgtccattgtctttctgtgagacccgaagaatatcctcctgcctgataagtaagaagaagattacctaaagacagggaagtagtaaatgggatgaagtagaccatgaaaaaagtatgccagttgcacaattgcatgctttgatggctcttgagcaaagtgtctagtaggccacagctgctcactaaccttattacccctagatccagggacagacctgcttcagaaccaataataaaataacactataataagactgttgggggttcttgtctatcttttgttcctttttgacttttggggatgtttcctagcaagtccctaaccagcaaagaaagaattagtcaatcatattctaatagagacctagatttttaagcttctcagaaatcattaaatattttataagttcattgatcaaagtaattggaagtgtagcatactccttatttacctgcagatctcagtatttgaagccacgattcctctattctggagtagttacagaactgagaaacgctgttcctactgaaagcctgtttgactccacgagaacagtggccttgaggcacgtgatgtctaactctctttatcttccttgttccatctcttccacagcccatttcataacacatgagtttgggaagaagagtttttgcttagctttttttaaaattaatttttatttaaattaaaaacaatcttattttacataacaatccgagttccctctccctcctgtccttccattctcttcaccattcccgtcccccccccaatctactagtcagggaggatgaggcctctcatggggatcaccaaagtttgtcacgtcatttgggacaggacctaggccctcccccatgtatctaggctgagagagtatccctctatagggaatgggctcccaaagcccattcttgcaccagggataaatactagctccactgccagacgccccatagattgtccaggcccccaactgacacccacattcagggggcctggttcagtcttatacaggtttcccagctgttagtctggagtctgtgagctcccacttgctcaggtctgctgtttctgtgggtttccccagtgtggtctttacccctttgctcatcactcctccttctctgcaactggactccagagttcagctcggtgtttaactgtggatgtgtgtttctgattccatcagctactggatgaaggttctaggatgacatataaggtatggtgatattttatggaaagagaaaggaaccctcactctttcccagcactggttcttagtgattttcctgaagttcctggaagtctatgaaaaaggaagtgcaggcacatccacaggtccacagtctgcacgcatcatttcctgtgcagcagtgaacactaagggaagcagggctggggacagtcagaacttcacaagtaggaaccaaggatcacactgagagaaccaaacattaaaagatcctgggattcccaggagcccatcttggcgagacagggaggcacataggcaaggtaggcatccttgaagaggctctcccctgtgcagcactctatactggacttcattatgggaaatttctgatacttgtgacagcggtggagaccctgggcacttcagaactaaggggggaaagggaagaggcatctggtttacctctgtccctgctgtctccagctgcatgatcttggtgtcactggcctaaggccatgtgatccatgggagcagaactcttgtactgcaaaggttctcaggtcattcactgactgggcagcctaagggctgagaatggtacagaggaaagagagtcaagttgatctcagaagccgatgccacaggcaacttggttcttccaactaacaaggagacagttccaaccttgaacctcaggttatgactccggggcttctcacactagagcattcagctacttttccaccctgaagagactcagacacaggctgtcattggcaaagcagaaatgggggataaaccagaatcagagacaattaagatgatataataagaatgctaactatttatctaacattgatttttatgtccctgaacaaagtgtgaattacttccacatgtacatcaaacttttgactctggattttcttactggttatgattttattaattaacataaaggattgtttcacagattgaaaacattgcaagatcacttctactaaaatatgataaaacatgaagtgttaattctaaaaatgatcctggtagacacactaaatagacaaaaggggttaagtaccttggtatgtagcatgagttggaaaacactgaaggttgaattttaatagttcaagactaacagagtaacttgagcatgaaaatcatcaagtaaataaaatgcactatgctttatacaacccatgtgttatttccttgcataaattaaaattttacctccgagattcataatctgaatatgactttattaacaaagagaattactgagagggttccaaaataggataaaatatattgagagaatgctaactatattactattagacaaagaagaaacaaatagcttccagaagtttgagtagtatgtaacatgaagtggaagaaaactaaagatcaaatcttatctcaagactggtagaatatattaaagataaaactcagcaaaataaggggcagtgcacatggacgtgctagcagcaactaaatgaagaatgctacgttttggaagtctttctgttgcagctgcttgcgtgtatatgtgtgtatgcattcacatgcatctgtgtcaaggcttgcaatgactctctcagagatacactcaggtttcaggcttggagtcaagtgccttatatgctgagccattttgacagcttcattctatgtgttttgtataaatatttgtctatgcacacttggacctctgagggttgttgctgtacctttatgtatatgtttattgacaggctgtgttaaacacaaattcttcctgaatccaaggttttgggcttttcatttctctattgtttgtgtttcttcccatggagaacaagtcaagacagcagtaaggtataaatactcacctatagatttgagagtgggaagcaggcttcacagttctttataagagccaaatccattttcttttccagccgtggaagctccatcatgatcccacaactagtgacaaacgagactgtcacagtgatttcaacaaatggaacaaactttccccaaacagacaaaccccagcctagccaccaaaagcaagacagcctgaagaaacatctgagagcaggggtcaaagtgatggcggtaaatccaattcagagcgctctggagtggtggggggcagagggaaatgacatgctctatgttgagaccagagttccattgctagttccattgtttgcaatgagtgctacagagcgcctttagacaagtggaagccccttggaaagcggtttatgtcttccccaggacttgccacaaaatgaggatttttttccctttaactttgactatgaattgatacgttcttgatttactagtttgtattccatttttcagagtactttctaatatcttctttatgaaaatactggtaaatagttactatgtgtgtaaacatatatatgtgtatacatatattacaaatacacatgtatagaaatagacacatccactatattcaccaattgtttgctcaggaatctatactgattttcaatggaatctttgctgtcactctgtcagggaaaaaagaagctcccttctcctccttgatcattccctttgaaatgcagagatgatacattttctttgcgcctctgtgctcacctctgttgggtcaagggagtgagaaagatcacacctaaaactgaggcaaaagtggagttgtttttcagtactgtttcagcactaagatgatccatggagggcctgtatgcaaacaagtttctgaacttggtggaattggggccttgtctcaaacaagcagtcacttgggttcctgtgagggtcacctgacagacagataaaaggtgctcagtgtgattagagtggtgagactctaagacgaagggggagaatggaaatccagactgaagaggctggggagctggacagagcatctaactctgtattgtgttgaatggatacaatagtaaaggggaggggttcagatgtttcctgttctcccaaagggagcaggagacttgctaaccatggactcacagctcagccccagccaggagatgctaggaagggtcttgagcatgccatgttttgttcatggacaaaaacacctgaaggtggcctgagactgtggcagagccacctcccctccagaatgaactttcctcctctcaccccagagcttttacagtgtctgtgtgctaacagtgacattgtagaaggtggcaatacataagtaccaccggaggaggggagaggttcctcttgtcagtgctggttttaatctcccatctcttttcttttgacaggcgatccagatcatgtgtggtgggatggtgttgtgtctgggcatcattttggcatctgctccaaaaaccccgcactttaccccagtgtattctctcctgttaaaatctggctacccatttgtaggatccttgtttgtaagtagagatttgtgtggagcaagatgggagaacagaggagggagctatcacctagctcagtttctgtctactgtgagaaagaggtggatggtagatctgtttcttctgtgcatcatccacagaaagtcctagtgtattagggcagaggttacaccattctgaagatgtttttcatctagttcaaataagcatttcttgtgaatatcatcttttcatcccacctattgaactatgatgaatttagtggccttgtaggtttagggaaaagtccaggaagtgagctccacatgatctagagctttctatatagtgtagtgacacccagtggactgaccacctggcaagagggagcactttcattcttaggatctggctttgttggaggaactcagggtgatgggctagagattcctcggagactgctccatgtctggggtcaggaggacatgaaagtccttctccagattgacgtgtatgagtctcacacacaagtgaggtttcctgtcactgtggcttcccatctgcttactacagctcagtaacagtttttcctttcctgcatttcattctttgatgcatccgcagctccatctttccttctgtggtgccaaagatttctgctttagtcatttcatgccaatacattgatttcatcagttgttcatgaatacccttctttgctcatttgaggacccttagttgtcccctcttcctgctctcctcttgacttcctcatacagaccttttagattttccttgtgatgactttccatgatgacgttgatagttgttgtctaagatgcagatctaattgaggccaggatgaggagtgattaggtgatgtcagagctgcagcatctttttgccatgtctcaggacagatgtgtactgtcaacacaagctctctgttcaaacaacgcttttcaggcagttatggtgttgtttttgtcctttagcttttcttcctctctattctgtggtcttctcatgtcattaagcattgctcacacgggagaagtcattcggttaattttagcttaattttaagaacatataccaagagctggtgcagtagctcggcagtagaacacttgagtggtacacacaaggccctgggttcaatctccaacacaactgaggaaaagagtcatttacatatatggacatgttaacaaatcctggagaacgaaaacatcagatttttcttgcattttaaaattcatgttcagaatcatcatattatttaactttcttatgtctactgaatctgagaaaatagttttgcttggcttttgaacaatgtttaagagttcatgccattcagccatcctgcctttttttctcattcgcctgatctctggaaccaccagctaaaggttgattttctgctcttgaatggcagttaataaatctgccccccctttaaaggaactagttcaaattattttcaaactcttacaaaaattggaatgagaaggatacacttcagaatcccttttgggagctagtgtttttcttatactaaagccggacaaagatattacaagaaaagggaagtaagggtgaaattcctgagaatgtaattttaaaattctttaacaacatactaacatactgagtatggcagcccgtaggaaagagtactcagcatggttaagtggcatttgttcagagatgtaaatgtggtttaatacatgccactgagaaagtatgaattccctttattaatgatggcacaaatccaaaacagccattccttgctattttttatttcttgaccaatatcttgctttttttcttcaagggtctgactcccaaattttcttttcacattaaaaatactcatttgctatcattaattttaatgatatagatttatgctcatacctgtcttttctcaaaactttctagatatcacatagggaaagggacaagtctatgcatttacacatgtcttaaatcacaggtcatttgttaccagggcttttcccattggagtttttcacatgcattaaatagtaacactgcagccattccatacttacaaactgaactgacaatgtcttcctcttctctgagcagtttgtcatctctggaattctgtctgtcatcacagagaagaagatgactaagcctttggtgagtaaaggagccataacctacaaccaatgaggatggaacctagcgagaacacttccgagccagtttcatcatattgagagctagaggctaagtttcaaacagctgtttctttgccttaggagccaacactttccagagtgtgttcttcctatcatggtgccccaaatcaaagtctgtatgatactcatgatcggtgtctaggaatctcacacaaaaattctgcttccgtatgctgctgtttcataggtaacaggtctggtggttcactttggccatcatctttattgcagtagggcacacggagaagattaggcatcacacctccgagaccattctgagcatccagatgagaaagtgtcagcttttttctcttttatttgccacaatgtcagattttctactctgccaactcctttctacaaccatgggttgaacctgtgaacccaggagccaaaatgtttcatttctcccttagattgatcatatgaggcattttcgtcaaaaatcttcctaaaaaaatcagtttttttttcttttttagtagtggcacaaaaaggcttgtagaaaaggtacgtgtgttgtggatttgctgtataatttcacctactaaattaaaaacttaagaaaaccagatgggattttatttcttcatgaggagttttcttccatatttgatctatcacatatgaaatatgcttttgtcagggctcactttcagtgtccagattgtggacattgatcaagaagtccaaggatatgacttgttactgttcaaagcaacagaactaagtgacctagtatactctagtaccttcatactcatgtccataacttttagaaaggtcttagctcaattctcatattctataagccactcaagaaaaaaactgcttccaagatcagtttatttatctccctacctcatgaatgttatagagatgagatctagggtgacagttggtggaaagtcactgaggaactgagtgtacaaggacactgggagtctggggaaatctggtcctgtttcctttttcatcatgctatttccaaatattgtgttgacaaagaatacagccttctgtacctgacccttagtagagccagtcatatgggtaaacacagttcagggcttggctgatgctaagaaccatgttatcacattcctgtctaggtgcatgtgcttttgagagagagagatagtataccagcttaactactttacttgccagccctgtgtgttcctaaaggtttcctgggtgtttccaagtgtatgagtcagtttttttttttttttttttttttgcaacaaaaatatgggatgaacacggggaagggcctaggcctatcccaaaggatatgacagactctgaagatcccccatggaaggtcttaccctccctgaggagcagaaagggtgtgggataggtagggtgttagtggggggcaggggaggaggggagggagagggaactgggattgacatgtacaacaaacttgtttctaatttaaataaaaaatgaaaaaataagggatgaatcagtttatgaagaggaaaggcttatttgggctcacatttggggcatggatgtttggatctgttcctttggaaccagtagagaggcagaagcaggtcgggaaacacaatatgacaaaccttcaaccaggctacatttgctaaaggctcacattatcactcacctggaaattaggtcttcgccacgtgggctttgggggcatgtcagattcaaattatactacagaaggtgttgagagataggggaaatctggcatctacccttctacctttggctacattctactggggatctttcagactcgcttcttgggagtctgcttgaggttgtgaaagaagctattaggaagactattttttccctgcctctgaagtgctgtctgggatgggattctatttatctaatcacagtttaccttctgggctcatatatttgtagatacttagatgacatagagaagtaaacaattatgtttttagatcctggagcagacaaacagctgggactgttgcactgaaaaagaggcttaaaagatatatgttgtcattgcaggttcacagcagcctagtcctgagcatcttgagtgctctctttgctctcataggcatcattatcctctccaccaacctggcttctttagactctgccttgcagcagtgtaaactgacggcaataccaaatctagccacaaccacaacatatcaccatttccttcgcccatatctatctgatgagaactgctttaaggccaatgatactttgactgtaagtatttcaaaatgatatgttccagtttttaaggatttttgacagctgatttcttctgctcccagattggaaactctctatccattctctgttattgtttctatgttaaaataattagttttaaaacaaagattcaaattagttggtttcattatggcattttcatctgcattttgtttttttaattttaattcttgtttgtgtatttaggttaaagccagagccatggaagacagaggcaagaatgaaaatattattgaaatgctacacaaaggggtcatgtagtaatagcaaaatgttaggtaaaattaccaaattaagtagatgataaaactatatagaccactttttcatttcttaagggttatagaaaatactgcaattttagaggtataaaaaatgaggttgttaaacaaaagtcttgatttatggagtggtgaatgaagacaggcagacataccagaaataaaaaagcaggtgatcaggagatgccagtgagggaatctggtgcatgtgcatggtacaggctgtggaacgagctgagcaaatctcagccagtcactgagagaatgggaagtacagggcttgggaaggtgggggtagacatgtcagggattctactccctccagtaattatactaactaggagcacctagattttgtggaggtgatctcactgctgcttccaatagagttcaaagagttgagatttattaaatgaggagaaaagaaatacagagactcacagaagagtaattgacagtgatgtgaaggagtgccatcttatttagaagaacattcattgtccccttttgataaaagtcagataagccagagacacagtgggaggaggaccagacagtcaggtctggtcaacctcaggctttctcatttccttatggagctgggctcagggtgtcttccttagttaagaaaccacaataagaaagggtatacacagattagatgcagaacaatgggagtaaattaccatctggaatcactaagcctgactttagaagcctgaagcactgaggaggaaactgtgtggaccacaaagtatgagggcatgatgggatagtttcacattgtgagtcagagtgggctgagtgtgtttgctgggacagtgtctagataatggaggtgtgctccatttccatcttcaattcaagcagccttcataaatatcatctcaggatggaagtcatgggctctgtgttcttaaccaaggcccttcttccagctgatgtgtggtgttacagactgtagaaactgggttgtttcaccatcttaacgatcacacagaaaaagcccagagaaacacatcccaaggaagaagattctatcgatgctaacttttacaaagagtcagaacctcactaaccctcacaagactctgtggaggaaataaatattacacacacatgagaaggtagagaagcagagacttgcccagcctcacagtaagacagccaagagcagaagctgttgactctgtcctggcagttacttctccactctgctccctcactgagtgaacagtgtggtcagggtttcctgcccaagatgggtgagaagcaatggcagaaatgtctttgttgatttagtttgtctttctcacccatttcccctcaaggactgaaggggccaggcatcgatttaagcctaggtttgggaggattcattttccttctggatggtgtcctttcttcactctctgatagtggagatgctttcttctctatagtcacttcccaccaaagcgtgtgggcgcctcagctgactcagtcactccgacctctcctctcctgaatctagggaaccctttcactgatgctgatctgcagtgtgttggagcttggcccggctgtgctcactgccatgctgtggtggaaacagggtcactctgacttctctggggtgagtatgctagaggcctcccggaatcttgtctggtgtttctctggcatatattaattaattaattatgaatatcagacaatatagtcagctattttgaaatgtatatcatgtggttttcatagtgagggaaccccagtggataatggagagaggagacagatgtatagacgatgaggtatacctggactagaactggttgtacattacatatgtctcggttctttctttcacaaataaacaataagatgtttggggaagttaaatgtatctcatggcattacactgtgtttacctgtgttcagaatgctagagcttagctgcctccctttggatcaggaacactttttctaggagtgaggatcctctgaccctcctagcattctcatctttgaatagagatgacgtctatgtaaaacttcaaagggaattatatttatatctgtatctatttatctgtaggtaaagatagatgcacatctattcagttaaatttgaggaaagtctgaatgttgatgtattttcttttttctagaatgtgattttcctgtctcgggactcaaagaataaattcagtgtatcctcacagtcactttgtaaccctgaatgtgagaaagtacaggtttcttaataattaagcagaaattacacaatagaagatcagtctttagtataatttagaaaagccatacatcgaatgacagcaaagcttgaatgtcttaaaatgtgtgttggttattcagccactatgaaaaacgtgttgaatggctgggttcagtaacatgctctttattttgtttcaaccaaagctcagacctgcaccttccaattttatgtactggtcaaagagctgcacacatttctcagaaaactagcaaatgtttcagaggctcacggtggggcaaaggggcagcatttctccttatcctttgcacttggctgcaggaggtacatgtcaatgcctgtgatctgaatctgtgtacatggcatgggactttgccatatctattttattcctaagtgctatgaagtctcaaagaacatacatgctgttggcctcaaaataaagtctatatgtaattgcatatttcacttgtatggtttggttttgctttttagcacacagcatatcactagtgataggcaggtcaagatatagtctctttattccccaccaaatacaaccaaaagttgcaaagaaaagctaactaagaatacccatcatctactaagaaagaatcagggtatctttttttctgatttcaaacgacaaaggaacagttgtatattttaacgttttcccagtgttcaagcaaatgtttgttctcctgctcatgcatatttcccctatttctttttctattgtaaattctatcctcaaaactggaagaaatgccatcaagataaaaatgtggattaaaatgaatctgaatgaacatccaatatttagcaatactgggtaccaggtaggatacttgattctgggatcaccagagttaacacgataatattcttggcttcaagtcattcatagccaaatactggaagtggagttaacaataaacctaggattgtatagtccagggcatttattcaacctttgtctaggataaagtctatttattctgcccatataatgtaggaattagggaaagagggggtaagagggagagagaaggaaaggagagagagagagagagagagagagagagagagagagagagagagagagagagagagagagagagtgttggacagtgtgcaagtctgtggagcattttcttgattgactattgatgtagaaggtccaggctcactgttggcagtgccacctttggccaggtagtactggatagtatatatatatatatataaaaaagcaggttgagcaagcaacagagaaaagccagtaagcagcattcctccatggcctgtgcttcagtttctgcttccatttcctgccttgtcttaacttcatgatggactacaactgtaagttaaaataaactctccattcctcaagttgcttttggtaatgatatttatcacagaaacagaaacataattaggacagtatcaacccactcatccaccccagtcctctttctcccagcttcctccttcccagtctctaattgtttcatcctatttacatatcactgggtcttcttttaaaacacaattatttttattctttgggaattctacatcatgcaccccaatcccactaattccccagtccctcggtatctgccctttacctttgtagtggccctccaaaggaaaaataaaaagataaaatacaaataaggatagtcattaaaaaacaaacaaaacataactaaaaataattaaaagcaaaacaaaacagcaaacaaaaacccacttctttcctcctccttttctgtgtctccatcacctcttcattcatctcagtggcactgggagctgctgtgtatcatgtagtataccctttggtccaaagagtattacttgcaaatgttcattgtgtaatgtcttgttggtaccaggcatttggcttggtacaccatcagtcatagaccctcactgaaactcctcttggatatcctgcttttgcccctaatcatggagatctgagacgggccccttcatgtaatccagcaggtcatagacggggtaggtgatggggtgagccaactcaaagccctggatgtgtgtctaggtggtagctgagttggtctggctgggccactggggccaccccttcagtgtgaggggcagagccatcttcctacactcctggtgaggggtggtgccagctttcccaagagggagcaaggagagagggcagatctcctattccaggcagggcctgctcaccagtgccagggtaactggattctattatcccagagccagtgaggggtcagctatctggaacacaggccccagctgtgacaggactatggatttcagcagcagcaacttggatccagatgtcaccacggttcttggtggcagcgcaggcctctcagattggcatgtggctagcagaagtatgatccctggacttaaacatgccaccaggtggcagcccagaccctgggcagaggcattgcctttcatggcaataggagctatgaacctcaacacagatcctggctgtaagcaggcccacagacatgtaatgccagtgaacttggggtggtggccacacttcggggtgtgacttcaggtgtgtggatgagaccccttataagaaagaggagtcactggctcaagcttgtaggggaagctgtagcctcttttagactaaaaggggaattgtaggggaagctgtagccacgcctacttaggggctggctacagcttcccctacacaagctctcttgggttgtggtgaaaggatcctgaagggcagaggctgcatctccaggagcagcaggaagaccaccgcagttatttcccattattgtgtgagtgctcccctaacaaatacctgttaattctttatatgggtaattgtggactttaaaaccaccttcacagactcagacatggccctgggcagcagcccaggacaggacctcaccatgaccctgggtgtcaaacaggtcccccacatcagcccattccttactgcctttgcctcttcagatctgcctctccgtatccataaaactaaagaaaagggaggagtgaaaaatgccatgcctaaaatcttgctgtgagttagcaattagcattatttttaatctgagaggaaatcacaggttttttttttttaggtttaagattattgctttaacattcacattgctgaggtcaggcacataatcatgcatgatttatttgagctggtgttgtacccagactctcgaccccaaaccaccaagagaccagatccaatgcaaaagcaaagagtctttttaatttatgagttaattcgggtcctctgtctgatacagtgggtggagtaggaggggaccctgagcagcagtggggcaggacatatattgggggtagagcaaggggtatgggtatctgggagcctgctagttgcatagtaacagtctcaggattggtgcccttccaggctggggaacctgtgttgagttgattggtcaactgtagctgcagaaaggttgctgtgcctggaggccatgttgctgcctactgcattccactattatcagtaaagcacctccaaaggtccccagctaacttctgagtggttctttaccacatggagggtttctggcagtttcttcccagtaattagggcaaggtgggtgggtcctgctgggtcaggagccaacattttcctggatcttttctgcagcctgtcatggctgccaaagtaggatccttcactggcttcttggaaaagcataggaattaggctacaaggaatatacaggacgtctttagttaaaacaagtagaaatcagatatgattctatccttagaaactacgaatctcttgaggctttatattagcattgatgggaaatgagatttgaaagtggtctgaactgataaatgcttttttgtccctgataaatgcttttgtcccaaagtagcagctacatatgcaaggactacacaaacaaggactactactcacaatttcccatggagtgagaaggactttcaactaggttaatctttctgaaggggtaggccctggttgtggtggtgagcatgagaacagtgtgtaagattgggaaaaagcccaggaatccacaaggatgacaccagctaaggctccaagtaatagtagtgagggtgcctgaaatagccttcccttataatcagattgattactaccttaattgtcatcataaagatctagttactgatggaagcagatgcagagatccacaactaagcactgggcaaagctcccagagtcaaatcaaagagagggaggagcaataatatgagcaaagggtcaagaccatgatggggaaacccacagaaacagctgacctgagtggtgaaaactcacagactccagactgacagctgggaacctacataggaccatgttaggccctctgaatgtgggtgtctgtttatggagccattggtagtgggactaggatttatccctagtgtatgaactggctttttggagtccattccctatggagggatatcttactcagcctaggtacagggggagggccttggtcctgcctaaaagtgaaatgacagaccttgttgattccccatgggaggtttcgccctctctgaggagtggatgggaggtggagtgcaggggagggaaagtgagggggtgggaggagggaaaggagagagaactgtgattggtatgtaacattaaaaaaaataaaaataaaaaaaagattggggaaaatactacttcctggctaaactatggtgacaggtaattttagttttatacatcattaatttggtgtatacggacctaacaaatcctaatatgattggctgtctcaaccttgaagggtgtctgcaatcaacgtgaaggcacgactgaaaaagagtagtatcctataaattggtacagaaatgtgtgagagggtcctgacaaaatgatgagacttaggacattgaactctcagattatgatgggtctattctgactgaggaactgacttttcactcttagtagattcccagcctgactggagtcctactgtacctgtgtgttaaagaattaaacaaccattgtctgcagaaatagcagtaagctttcctgaaggagatccaaggaagacaatgctgattttccacaggtgcacactcacaacccagttttgtttctagatatataaccagactagtgagtgtgtttccaaatgcatccagtgattatttcctcagttgctatgtataattggaataaatgtactgaggagctggtagaatctccacataagttctgtgacctgtggagtgtggtatattgtggttagaaaggccagtagaagctattgtatgtgtttctacttgggaaaatagtgagtcaaggtcagtaatcatatccttggagaagctatggagagagtaccaccaccattaatgtaaaagatgcagggtaatggtttcaaccacatctccatttaactttcctgtttggcctgtgtagaagaccaacagaccttagagcatgacagctatgtgtaatgagatggtgtattaaactgctgctgctgctatacattgtgatttccttttttttttttttttcagtttaagttatctcctggtactgcatgcagcaactgatttggtaaatactttttttccctccatatctgtctgtaaggtctaccagaaccaatttactttcagatggcaaagccagcagtataattccactgtccagtctcaaaagtctattaattgtctcagaatcgatttctctttgcactttgtgttttctgagatatggtcacttttgctgttttaatgttaggtgtctgtcagtctttgttaaggttatgctgcagtgttagtgttatctgaaataacagcttaataagtgaggtgttggagacttctagtgaatgcaccccttatacatacatttacttgtcaagcttgacttgttcaattatttttgggatcttggtgcaattccaaatggggtccatgtgcatgcacaggagcatacacacacacacacacacacacacacacacacacacacacacacacacacacactgtagtcaaacacttttgttaaggatgttctctgctacaaaaaagaaaaaaatactctgtatatttctaagaggagtttgttgttgttgctgttgttgttttaaaggagaagctactgtttttcgttgagggaattttataggttattttttgagattcctagtattgtgttcatttgggtacctgagttgaactcacatggttctgaaagaaaaccccgatagtgagcagatagttcagatgcatagatagatacacaggtatttactaattcgtaaactctttaactatgtaaattagaatgcaagcataaacaatatgacaacaataatatttaattttataaaaaaggcatagcacaaaacttgaaggaacatgtttacattttaatttatataaaaagttgacagcttggcttaaacatgagaatattatatgtgagaaaaatcagctaaacccatgccaacttgagaaattattgacagtgctaaaaagaagtacgagttttaaaaaatagagatttgggggctcaaagcctcctgatgccacccacaggaatgctgccagtgccaacatgaggctggctatgagaaggcagaaaggaggtcccacatgatatggtctttgcccagattgtgattgacactatgacaaaagaggcattgacagaatagatgtaaaatgtactagaagtgaatttttccatatctctcatttcatttcatgtttctgcctttgatatctggacactaaactcatagaataagatgggcatgccccatactcttttttaaaaatttatttgtaaatgattggtatatttatctttaaatattgaaattaattcacctgcaaagcactctgggcctaagtttctcttgtgactattgctccaatgcctgtacttgttatatgaccattcatattttaaattcttttatggtaattattattgggttgcttttcattattttatcttcctattatttgttctcatttcatttaatagtataaactacacaatggtgttctctgtgtgactttaagtcctattagtttctgtagagttggtaatgatgtctccttgctcataataggtttagaaagtttgatactaacagtgatggctgagctaaagttggggatgcactgatgaaaacaccaactatgatttctagggggtaggcattccttcctttcctgaaacaagttgagttacatgactgcagtagacaagggttgggagacatgtcttctttctgcttttaggcagaaaataagaataagtgtactttattgtagactcaaatagaatagatcttatacaatatgatactaattttactgtcatcccctactttcaatattttattacaagtttctttctaatatgtctttatgttctacacatattttacatggatgtatgtctgtgcgctacgtgcctgtctagtgcccacaaagaccagacgagtgtgacagatcatctggaactgaagttacatatgtttctgagcttccatgtgggtgctggaaattaaactcaggtcttctacaggactaatctgtgcacttaattgctgagacatctctcaaacctcctataagaaatgaagaaatgtctcttatttgctctggtaattatagaaataagtatgtgatctggcacctgaaaaatatgttgttaaactttgaatgttcattcagattcagtttaatacatgaacactacaatactctctctctctctctctctctctctcacacacacacacacacacacacacacgacagagatatatgcctagttgtcttttccatgccttttttttcattaaaagacaacaaagggatatcaaaataatgtgtttatgtgtcacagggagcttgatctgtgttcaaaggcaaagcaacaacaaaaacccttactaatagaattcacaatcacaaaacactttatttttaaaccaacatgtatagttattgagacttcattgcagttcacttgtttctatgtattaatgaataaaattgaaataatgaaaaacccatgccaccacagggattctgaacacagggataaaatggttgactattgttgttaatggcaggggacaagacagtgttgcccctttgctccatcatgatcccctaaaacattctgttaattttccgacaaatatctggggttctttggccactatttgcaggtccgagctttggttgaagccaaggtcatgaaagtcaagaggatgtcactggacacacctattcaccacattactggtattcaatttttaaacagccatattttaggaaacataagcattgctgccttgtgatggttggattttctgcattatcatgaagacaggctctccgctgtatatttccatttttttttgttgttcttaagaaactaattgttccgaatatgcagggttacaaagtgactttgtttccatgctgggttcattatttgagttgtgagacatgaaaatcacattctagaataaagaaaatatgttgtttcaaactacaaatgaatatatatgtgcatatatatatgcacacaagcatatatatgtaatgcaataagaaagtagatagatacatagacaactgtatatacatgaaagaattccatttggtgttgagcatagaacttattggtgttctaagatgagaataacaccatatatatatatatatatatatatatatatatggttttttgagacagggtatctctgtgtagctttggagcctatcctggcactcactctgaggaccaggctggccttgagctcacagaaattcacttgcttttgcctcctgagttctgggattaatggtgtgagccatcaatgccaggctgagaataacacattattaagttatgcatatatttgatgtatatcacctaatctcctttctacactctaagtaaaaatctggctagagtaaagcttttggttcagttactgaagacatgcaccatgagagctggctgagaaggcttacatgcaactactaaacatcattgccttaatatctttgattcaagaaaaaaattaagatcagaaggaatgaagtagagcctaagatgttgactaaattacgttcaagtgtacaatttgtctttaccaagtcaaggcttttaatgagactagtctctgtaggagaaagtagtcctactaagaagagaagcaaccaggctccagcatcctgaacacaggcaaacctgatgtgggatgtccttatgtatgctacaaatatgtgtttctattatcggttgttgaataaactgtttcagccaatggacagacaggatttagccaggcaggaaaactgaacgaaagctagagaaaggtaataggcggagtcaggagacaccatgtagtcactggggaggtaagatgtctgatcattctccgaaaagaaaaggccacatgaagatacacagattaataaaaacgggttactaataaagagagagatagccagtataagcctaaacctgtggccaaagaattagaaatagatattaagtctcacagtggttatttcatagtggctgcgaggacccaattgggtggagagaaaccagtccagtgggaccaagactaaacagaggaaaatctcctttctgtacaaactcaacatcattccaggtgatacatttcacttcccagagtctcagttccattgtttgcaaaatggaagaaccaggtgaagtgttagggtcacctattatcatgttcaaataattcttttcagctacacaattgccttctatgccttcatctactctcctacctgactgtccaaaccacctactgcttatatcgtggggactgattattctatatgccattcatagcagcaaagatcagcacatcccagagaaacaccagacaagattccaggaggtctctagcatacttaccctagagaagtcagagtgactctggttccaccacagcatggcagtgagcacagacagtccaagctccaacacactgctgatcaacatcagtgaaaggattccctagattcaggagaggagaggtcggagtgactgagtcagctgaggcgcccacacgctttggtgggaagtgactatagagaggaaagcatctccactatctgagagtgaagaaaggacaccatccagaagggaaatgaatcctcccaaacctaagcttaaatcgatgcctggccccttcagtccttgaggggaaatgggtgagaaagacaaactaaatcaacaaagacatttctgccactgcttctcacccatcttgggcaggaaaccccgaccacactgttcactcagtgagggagcagagtggagaagtaactgccaggacagagtcaacagcttctgctcttggttgtcttactgtgaggctgggcaagtttctgcttctctaccttctcatgtgtgtgtaatatttatttcctccacagaatcttgtgagggttagtgaggttctgactctttgtaaaagttggcatcaacagaatcttcttccttgggatgtgtttctctggcctttttctttgtaaaagacagtgaaacaacccagtttctacagtctgtaacaccacacatcagctggaagaagggccttggttaagaacacagagcccatgacttccatcctgagatgatatttatgaaggctgcttgaattgaagatggaaatggagcacacctccattatctagacactgtcccagcaaacacactcagcccactctctgactcacagtgtgaaactatcccatcatgcccttgtcctttgtggaccacacagattcttcctcaatgcttcaggcttctaaagtcaggcttagttgttccagatgataatttactcccattgttctgcatctaatctgcgtatacctttttttattgtggtttcttaactaaggaagacaccctgagcccagctccatgaggaaatgagaaagcccgtggttgaccagacctgactatctggccattttctcgttgtgttttttcttatcttacttttatttccataagcagatgaatattctgcagtatctttattgttattttacctaattttctctttatgtgttgtgggccaaatgtatgctcttggatgttctaattaatggcatgttattactgttattcattttgcattactttcttccaataagatggaattccttcacatcactgtcagttactcttctccatgtctctgtatttatttctcctcacttaataatcccacgtctttgaactgttatcaaagtagtagtgagcttgcttccatacaggcctgctgctggttactgtgattactggagggagtagaggccctgacaaattacacccacctgctgcacttcccacactgaatctcttatttcttggctgaggtttgctcatctcatctcatccctgtatcacacacatgtaccagatttcctcattcccatctccagagcacctgagtctttttggtatgttttcctatcttaatttaccaatctgtggaccaagactcttggatcaagctctcataatttatgcttctaaaattgaaacatttttttcaattcttaaggaactctaatgatattttggttttacccacctacattatttggtaattttccctcatctcctcgctattaccatgcaaccccttaacctagacttttaattccttgctcttacttacctttgctttattcagccttgaccttttcctaagatctctaacaagattgagtggaagattttcaaaagataggcaaaagatcattattttccaaaaccagacattttcaatacagacttcataaatacttacagtcaaaacagcctggggggcagagcagggacttctttgaacatggaagtgatagtggtagaaactactttcagttggtctaagtgcccagctcttctcgcactcctctaaggcaggatgcaaaccagccaggctgacagtgaggataatgatgcccatgaaagcaaatgaaatactcaggatgttcatagtcaggctcccatctacctgaaatgagtaacagctttcacttatacctcttttccaaaatgttgcaccaattctcttcatcttcatcagcagctgaaagattaataattcatttctctattctccctaactcataattgtgatcactagaaagaggagaggtccttgttttttacccttatttttcctagactccatttcctagatgataatttctcagaccactttacccaacctctaccatatgtattaggcccaaagaatgtctaggaacacataaatggcaattgagtggaaaaacagtatttcaatgatgagaaagaaaatattcccctggagaattcacctatgacttttaatggaaccctgtaatgtaaaactggacaattctcaagacagtgtgagtaaaggaggaggtgcagacaccagctgtgttccctgtacctcaacattctcagtgctatagtttggatttgatggggcctgagacccacatgttaaagacctgatccccaggtagatgatactgtgagatgtcagaagctctaggaagtgcatcctgatcaaaggttcctcatcagagaagagcctgtgaagagggaatatcagaaatagtaacttcatcttaccctgtcttttctttcttgctgctatgacacatacctttgctctctttagcatgaaacatgcctatctacaagctcagaacaacaaatggatccaccaaaagcatgcactactaaacatacaaaatatgagcccaaataaagcactcctctttttgagtagagttatccaagagttgatcttagacaccaatactggctaattcgctcaaaataccatgccctgcccatagcccacacatggatgtatcaactacacagaaaaagcaggtgaagtagttcattccttacatactactcagaagttcatatgatcaaaggtgttgggactttgttctcattttcagtaggattatgattggcaatgaccagggccatgtggggatggctatagatggaaatatagacacatgactaaggatgttgtcatttgtggaaacagcatgaggcagaaagaaacaggatggaactagatgttggtaaattgatgccatggtgtcagagttccttgatctttcattgttcttgagtacatagtcccaatgttcactttggatctcatctctacaacatttatagtgtcagtgaaataaataaacttttctcaatagtgacttcctttcttcctcaacttataaaaaaaatgaaaattgagctaagacctgtctgaaagtcatggttacaggtaggtgtctccaaggtgtacccagctatcttgcactggagtgatataatttcagccacttttattttagactgattgtataaatcactcagaatttggtgctttggggtgctactttctacacatagtgactaaagttaaactcttggactcctctagcaatagttgtaatcaggatgctggtctgatatattcttagaaaaactatgtttattctagctgtcattcttctttagtctcccatgggatgaaaggagcattcttcagcatatattaagtgtctttcattcttattctacctcattctacctagagactacctatatccttggttgcttttagtcatggtattttaccacagcaacagaaaagtaattaatgctctatgtatttgaaagactggtttagtcatatctcaacaagtaaattctcaggctattgcattacatgatgttctctcatgacttcctggatcaactccttgaggaatgtgagttgactgatggatgagtcggtgaatctttaaatatctcaaaagcttcctcctattgtccatctttcttctcccaatgacttcagttttccctggaaactggtaggtaaaactgaactcttagccaaaaacaaataactgaatttcagaattcaaatattctgcttcttggttcaaaaatgtatgctcaatctcagcaaaatcattactgttatggagatgtagatggaagatggttctcacgtgcacattttgagattatataggatatccacaacaaacttaactctttataagtaaggacattagcttcactactgaagagtaaaatttgaaaggtttttgttagacttttcattggtatgacaaaatgcttcacataaacaactaagcaacaaaatatatttggctcacagtttcagagtcttggcataccagagtgaggctggtgtggcagagaagagcagttcacagcatggtggtcatagcagaggtcattgaaacatggtgagaggatatctgtgccaagcacatgtcaatttctcctgcctactccatctgagtcttcatcttaaggcatgacactatcacattttggaaatagaacagcctcagaggtatgctttattaatctccaaggtgttcctcaatcacctcaatcaagttgttgatcaagattaattatcatagcctgtggcctacaaaatagaatcgtaagaaagcaggagttttacgtgagattccttggcactggtcttgggcctaaggcacagtaagatttcggtcactgtgacaggaagaatgtgctctatatagggatatttagaacccagaatcagctcacaaatagaacaagtaattactgaagggcttagcttgcaacttcagtgtggaagctgagccctgaatagttctctctgggttccatcctcatcagttcggggttatggatcttgtactcaccaaagacttctttgactttgtctccgtaatgactgtcagaattccagagataataaactgctcagacaagaggaaaacatcgccaggttaatttctatgtacaaagtgactacggtattactctcttggctttatgagaaatttccatgggaacagcccaagaaacaaatgaccaatgatacacttaggctcccataggagtccatgtactattcagaaaacacaaaaaggtagacaagagcagaaatctatcccattaaaataatactttaaaggtagtaaaaacgtatcatgttaattggaaaggaaaaatttggaattagatgattctagatcctgaagcattggtctacagggaaagagaatagaaaataggtttgggttattttttttatcatcctcagtgccttcaacaaagccagattctaagaatgaaagtgctccttcctgccaggtagtcagtccactgggtgtcactacattatatagaaagctctagatcacatggatctcattttctggatgttttactcaacctatagaggccactaaattcatcatagctcaataggtgggaagaaaaagatgatattcgcaagaaatgcttatttgaactagatgaatagcatcttcagaatggtgtaacctctgccctaatacattaagactttctgtggatgacacacagaaaaaacagatctaccacccacctctttctcacagtagacagaaactgagctaggtgatagctccctcctctgttctcccatctcgctccacacaaaactctacttacaaacaaggatcctacaaatgggtagccagattttaacaggagagaaaacactggggtaaagtgtatggtgtttggagtagatgccaaaatgatgcccagacacaacaccatcacaccacacatgatctggatcgcctgtcaaaagaagagagatgggagattaaaaccagcactgaaagaggaacctctcccctcctccggtggtacttatgtattgccaccttctacaatgtcactgtaacacacagacactgtaaaagctctggggtgagaggagggcagttcattctgaaggggaggtggctctgctacagtctcaggccaccttcaggtgtttgtgttcatgaacccctggcatgctcaaaagaccctaagatctcctggctggggctgagctgtgagttcatggttagcaagtctcctgctccctcttgtggtaggaagagtaatctgaaagcccttcaattgacctcttgccacatctcccagagcccacagaacaccaccatgagctagcctatctgcccagctccacaacaactttaatctaggtgtccattctggggatccttagcctctgtattaaaagggcaatcgtgtctttctgtcatcctcattcacccatagactctcagcccttttaagtttggttaagcaatttaaaaagtttttgttacatgtacttcaaagcaattcatatgattgtatgcacaaggtaaggccattggttctattaagctctgaaactgggtagcacagaggcccatgtagatagtgttggcagagacaacactgaaaaacagcctcggctttcttcacagcacaaagtatttgttctttctcatttcctccctttacccaaaaaagtccctttagtaaatctgggatgagagcagaaaagcaaaccaatgttttttttgttttgttttgtttttgttgttgttttttttttttgtactgcctcttctccctaaagaggagaaaggtattttacacccagtgagcgcctagaatgtatctacaatttatttctataaataaaatactagcaagtattttaaaatactttaaaaatgaaaacaaaaaagaattaaacaacaaaatctcaacgattcatatttgcaataagggaaaaaatatttgttagttgtggaaagtcttggagatacatgcagtctgccaaggactggtctacagaccactctgtgatgactttgtcaaaattgaagactttccataccccaaatctatttctagtcctaagacacagtgtctcttccttctgccctccacccatcccagagcaatttgacttgcgtttaccgccatcactttgatttctgcctttagatatttcttcaggctgtcttgcttctgctgggcaggctggggtttgtctgtttggggaaagtcaactccatttgttgaaatcactgtgacagtctcattggtcacgacttgtgggatcataatggagcttccacagctggaagagaaaatgaactcaactcttaaaaggaactgttctcactgtagcaatttttgttgttttgtttgttttgttttgggctgtttgttgagagaaagaaggtatgaaattggatgggaagggaggatcagaatatattgtatgaattttcaataaaaaaactaaatgctttactctgaatacaaaatgtccaaccaacaaacaaaacgatataagctctgctcccaggttctgctgccacctcccagactgtgtgccttcctgtatgcttgatctgttttctggtagatgtaactggtagtacagagaaatgaaaacctaacacaccttgggttcctcaggtctttcccagtaatgttggactgattttagataataaacacattgtaggtagagatagcatgagtctctagaggttcctgtgtccatacctaaaagttcacacaaaatttgcaaaatgtagctgagctctttcctcaattcagcctatcttaagtgcattttctttattcgatgacatttaccctcaagttactctgctagtcataagatattaaaatgcaatcttcaatgttttccaattcatgctacataccactcaaaatacttaatcccatttgtctgtgagtctaatagtaccatttttagagttagcacttcatattttatcatatttaatagaagttatctcgcagtgtttttaatccttgaaaaacccttcctgttaattaataaaatcataatcagtaagaaaattcagagtcaaaagtttgatatacatgtggaagtaattcgcattttgttcagggacataaagatcaatgttagataaatatttagagttcttattatattatctattgctatttattataaacaaattatttaatattatattaatagtaataatacatgattattaatcagttgcctacacacagttgggtgttggaccccagctgtctctgactctgcttcttctccccatttcctccctccctgctaatggcagcccgtgtctgagtctcttcagtatggagaagcagctgaatgcactgatgtgagaagtcctggagtcataacctggggttcaaggtcagaactctgtctttgttagttggaaagactaagttgcctatggaattggtttcctagctcagcttggtgttgtgggatattttgatggcactctgatactccaaagacttcctaataaagttataccttgaacctggtggtggagttggtgactagctgattggagttggccacagagaagccagcaatttcgatatggaagacacacaggaaagaaaggacagggattggagtatgagcttcctcttggttctgggacaaggaaagagaacatgtctcgcagtatttctggccaaaactcaaggtcagctagttgctactcagtctctctgagctagcaggttttcaacccagtctttgacttctgagtcttattaataaatagaataatagaaacttaattcaaacctacatattgtggtagtaacagagccggggccatgggaccagaagccccaccaggccatggcctgagtggccggcagggtgtggctgaggggccatgggatggtagatgataattaaagaatcagtagattcatgtgtcactgctaaaccaacagaaaaacttcagcttggctctctttcctctgtaccattctcagcccttaggctgcccaatcagcgaatgacctgagaaccttgcagtacaacagtactgatcccatggatcacatggccttaggccagtgaccaccaagatcatgcagctagggacagcagggacagaggtaagtcagatgcctcttccctttccccatttagttctgaagtgcccaggatctccaccgctgtcacaagtatcagaactttcccgtaatgaagtccagtatagagtgctgtacaggggagagcctcttcagggatgcctaccttgcctgtgtgcctccctgtctccccaagctgggctctcgggaatctcaagatcttttaatgatcggttggttctttcagtctgattcttggttcttagttgtgaagttctgactggcccagcccttcttctttcagtgttcactaccacacaggatgtgatgcttacagactgtagacacaagaaggcagttgcacttcctatttcagaaactcccagtagtttcagaaaaatcacagtactggtagagtgtggggtggtgagctccaatagtcagcagctccatgtaatgaccaagtccatgttcttgaaccttagttgtctaagtgttagagaacagcaacaagctggggaaagccatgaagatgagataaagtgtctttgaaaggcctgccttgcatcttaggatttagcgacctgccttggttactaatgatatttccagtcacagtaatattgatgaataaaacatttcacaatatacaataaagtataatgatagtagtaataattatacttaggctttgagggaatgtttaataatatataatcattgtaataattgaacatattacaatacttatggtacttgtttatttatgctttgctggttttttttgttgtttttactaattccccagcctctgaaaaagctacaagcagccattcagtaatcaaagattaattgatacccactttagagcccttctgattttcttcttccaacccacttctagaccacgggacttctctaacaatggaggtgcccaggcaataactggacactactaagaaagtaacagatcaggagagaagcacgtgggaaagtttcaacacacaagaatgacttcaactatcccgcagtcaggatgctgtcatgaagacagctgtccttgtgactttcaggcacagttcagaagctgactgatgataattaattgtacaggagaaacagagccacattcagcaactccacagccacactctggaaacttccttcttcttttccttgaagtcagccagtaagaactcagggctccagcatgagctgtccccgccacatcagagggatgtggattctgcagctcccgcatgaactcttctgatgaagacacaagagaggacatgtcatttcaccttttggagtcgcctttgttctcaaggccagatcctcacagaaatagatagagccctgcttcaatttacagaagattgagagaccagattctctaagacaaccatggaaatgggctttctggtgttgggtctcctttcccaggaagactattgtcactgccctttcccatcatgccctgcgtactcatggctgcctcaggacccagtgaattagtgaggtgcagtgactcttctgagctttgacaaagtagaagtgaggccttttgagggcagccacacccacctttgtctccaggagaatttgctaataaacaaattaaatctgtccacccaagattccctctcctctatctttcctctccttgctctcacaagtttaaatgtacttagagacatttaatagagtacatgaaataatgcctggaagactactctaacgaagtccttcaaagtgacctgagtggtattttttgccatactaccccatgtcttccccatccaactcttcccaccatcaatctcctcttttccccaacatagggcttttgtgttttatttggagaggggacttctacactctgagcaaaaagctgctctccctagtctcagcttagatccatcctgcccttacaccctcaagtgttcccagagtctgagtctggcacctgtacctggagacaaaagactaattaacaatagcacactctgcttagtcatctgggactctctagtcacaatctcctattctctctaagcacctttgcaaatgttctgctcctttggcccactacccccgacgccaggaaacgcctcttcatattttgcattcatttaggattgcttttttctcctatttttcccaagccaacgtgtacagtctctggtgatcaattattttctctttgcttaactttctccaccatatgctacctgctctctgatcttttgtaatactctcttctgaccaatttttatgctttctggatttgatcctttctttccccttctaagtataggagttttgttttttgttttttctttttgttttgtttttctgagacagggactctctgtgtagctttggagcctatcctggcacttgctctggaaacttggcctccaactcacagagatccgcctgcctctgactcccaagtgctgggattaaaggcgtacgccaccaatgccgggcttaagtataggagtttaacctgccttaattctatctcaaaatagttctcctattcactcttatagttcgtttaatcactcttataacctctcagaattaaagtctaagaataagcttatatatgtagtttgcctctgctactcttccaccattcagatttctatattactgcttccctttcccacaatgttattgatattcagttttattaaagactcaaaaactcaatatatcagccaactgttgtcggtttaactatcttttaaggtgttaacaacttgaaccaattttctctttggtcctttgatgtaggatcctgtgtagcccaggttgacttctaactcactatgtaacagaggctgaccttgtactgggattctaggcattcatgcccagacctaccaaatttgtagtagatatttatctacatgtattatacatgacctcttcttgtcatttcccttgactgcttttcaactcatcttcaatttattcatcatcaatttattattcatttaccacatatgtcttgctgaactacatatacactcatagttttcctgattttacctatccatttcactagactgaatgactgaatacctgctactgcaactcactaattgataaacatcactgaacaacaactgtgttagtaaatgtactgataaatcaaacaatatgcatcgtttttgtaaaactttatatctttgaaaaaccattatcattgaggatgcaaaatatttccatatagaaaattatttatgttaaatatatatatatatatatatacatatatatatgtagagagaggtggttttagtagattatagatgcccaactacagctgttgaagtttctaaaaagaacaatgtgccaaatattgccagattaagtttagttaaatccccagcctacttcctcattttacttttgttcatggttgcagacacacaataaaatctaaattattcctcgattacttcaagaaggaatgtatgtaagactgtgacaccaagcaagaaaataggagtagactctggaattactcagaaacatttttgagatgcttcttctctgtgtgtaatttcccagttaaaccagttcactgtttgtcctttagaactcagcatctctttttgccctggtcactgaagaactgcaatcgcaccagtggggagacagtagggttccaacactgtgctgtctatttcctgtcatttttctgtgtcagatgagaaagaaaacagtcttttagaccatgtcaccatggtccaagcatctccttttttgagagagaagcacagaattgtgttttcttcgaagcacacttccagggtaagagtgaagacaggataagaaaattgaatgaattctttacaattttagtaaatgaaaccttgtaggtatagaaaaatgttttcctttcctctgcttatactttctattctcttggtaaggaaagaacaaaagaaaaaacatgcttcaaatggagaaggaaaaatgcattactttgcaataacgttggtcttgttcataatgtcttgtggctaaactgtgattgggaaataggaaagatgcaattgcaaatgcagcctgaccacctgctcctgtgtcggccagattcagagaacaaaggctgagagtgtaacataagcactttcaatactgactgggatgtcccatccttagctgagaactcacttcccataaggagaagaacaaggaagtgacacaaagaacaaagagagaactgcttgaaaggaaacagaattgagcaaagtgttgggattcttagtgagtgtgacacattacagaccagaaacacatctgcagctgtgtctgactccagaggcatttgagtaaccccagtaagggaaaatgtctcattttcttacttgaaacagtttcaaatcgatcattgtcttattggtactggtcttaaaacgattgctttgtgtttttgtctgcatctatggacactagcatcattcatgagtgatctgctctcctaccttagacaccccataaattctctgtaacactggaagttagaatatcaacatctgaatttagggatatatttcaaagacatggaatattttacaaaacagtcaatccatactagccctctaaattacaaaacagtgcaagaacagatacaaaatgaaaccagagtgagaaatggcccaagcatctagatgatagcactcttaaaagaccagagaggcagctttatttataagccaaccatattgatttgaatatatgagtaaatgtaagatatattctagccaaattatatataatatacatataagttgtgaacagtggtgtaaatttagtagggattttttaaaagattttattcatttattatgtatacaacattctgtttccatgtatatctgcacaccagaagagggcaccagatctcataagggatggttgtgagccaccatgtggttgctgggaattgaactcaggacctctggaaaaacagccagtgctcttaacctctgagccatctctccagccaagtagggattttatactagattatgttaataaactttggaatgtactactgataataataagtaagtatattaattacgttcctgatcactccagtcaaagtacagatgaaaggcaaataaaaaagtagaagtttactttagcgaatggcttctgcaggtatggtgccactgggaggaagaaatggtgggacagcagtcacatgtgacagagtctctcagtgaggcttgcccctaagcagaaagctcatgaagaaacggaaaggcagtatgtactggtggccatgccagaggaacagcaggtggtaattgaagttcaaggtgccagcccaccaggtggaaactgtctgatgggccaatctcagacaggcgaagctcagagaccacagacctcagaatgtcttttgcttctgctgtgcctttacctgtgtagtgctgccatctatttctggtatctggcatggtgtgaatgggtgaggggagatccccactgcctgtaatgtagtgtgtttatctcatggaaacatcctatgtaataatcatctaagggagatgaaaaatatgtttttgtctatattcattataaatatactgggctttttttttttaacctgtggattattatgaaggtgattcctccctaagctgtattgtctaactgataataatgttagcttatacagagttttgataaataaaaataaatacaaggaaatgttacacagctaaggcctatgagttgcatttaaagagctgcatagattacagcttaagttaatggttaaggaaaaccactgagtcccaggagccagactggctcaaattcctttcatcttaatgctgagagatgcagtcacaggtttcagggtgtatcgtgagatgaaacaaagccttaaataacttcaggttatatcagatattttgataatagctttaagatgaaaaaccccagaaaataatctaaagttcacaatgacaaatagttgaattataaattcattagattaaggtcaaaaatataaagtatcccaattgttgctagctgacatactttccttgctaggtttggttggtgatcaaagacgatgattaattctttgtacccattcctgccctcctgatataaaaaaaatcattgatgagtgaatatgcaccctaaagccttaaagtacagctgactgagtgtttcttatgtgaaaaagttcaggtttgtgatttctttaagactcctttattaattttcaagataaatagtaagataattgattcttttctttttgtgtaacctcaatatgcagtatgccaacaaaagagttgtctgagaagaaatacttcctgtttgctcatgttctgttaatctgtaacaagccacctagatgtaaatgtatattggttattggggtgactttgtttttaatcatgtaagggagatgaaaaatatgttttatctatattcattatagtcattcacgtgaaaagtagaatctaaccacattgtaatccatacatatatcccaaactttgttgggctatataagctttagaaaagaagtacatggaggaataaaagaagaaggatactattaagagagggtgtaaatgtctttttccttaaccccctttgatagaaaaatctagtatacaccgatgccttgattccttttgagccttgtgctatctggaggctggttccccagcaagtggaacctcttcaaagccaacctttagtgacttgctttcacaagttagacctcatatctgaaaaattcagcaatctctcagaagagcggcaccattttgagaccaagtgttcaaacatgtaagcctgtaggggaaaggtgtgtgtgtgtgtgtgtgtgtgtgtgtgtgtgtgtgtgtgtgtgtgtgtgtgtgtattagggatcaggtattctgatttcaatcacttgtcttcactgtaacttttcaccataccaattaaagtgtacactatggtattctgtgatgcacatgcacatagagatttaaattgattgttttagttagtgatttaatatgcctgttgtcttatatactttgtctctttacatgatcacgagtaactaaatctacttatttagcaaaagccccaagtaaaatgtgtaccgtagtcttcacttcttgaagaactcatttcactaacatgtttttttttcagttcacattcaaaacttctttgccaattcaatatcctgtacatacaataaatggaagatattcaggtattgttggcctagtaaatgcttgggtttatttttttatagcagatctgatattcacaccaacatgcagtgcagtgaagtgtcaatttctcaggaaacaagtaatgagcgcacatgtgtgcgcacgagcacacacacacacacacacacacacacacacacacacacacacacacacacacttagaataggaatctttctccagtgggattcttgtatagattttctggaacatttctttcttggtatactggtggtaccaatggttgaagtatcacaggaggcactgttgctggcacagcaggatttggtggtagaattacaacaacctgtgaaatgaatcaaaatgtcattgagtcacccaatatacccagcgcttccttttccttaccccatgatgtcacctttaccagtgtctacaatgttgctactgagaacaatcacacatcacccctgttggtgtctcaggcaccacttagatcaggtattggacacataagatactcattctatggcagagtttgaccagagaagctgatgttggcagctacatcttggagtatcaattttccaggcaaatggcttaagtgaaacaaggtgttatgggaaatgataatagtgctctttcaaactagtttactcctgcagatagcatcacatccagacctcgatgtgacagccatgaacaaagctctgcacatgtgacagtaacccagaatggcagaagtatcatgagacttgagaaaattctgtccttcacaactcaagagatgtgggcagtgatagaatgaagaaaatgtatgcacttaagcatcttgtgcccctaggcccctgctcttgtaggttaactcagaagctcatcaggagcagcaatgctcagatctagggagaaattactgggtttcactttctctacttgaagctctgaagctttgaggacacatggtctacttcctggtctgtttctcctgagtctgtcactttgttatgtgaccttctttcttctcaatgctcaagaacatctgcttcagtccttggggaaagacaatgaccaggtgtgcacaaactgaaattttctgataaacaacagcccagtcaactccctgagcacactttatacaagacaatagggcttggagtggagaaaatggggctggatttgatcaaagcacattagatacaaatatggcattctcaaacaataaaaaagattagcacatgaaagaaacttgtgtacagaagactggaaacccttcttcatctgggtttcacctaaggaacatagcgtgctaggttgggacgattgtcagtgaaccatgcgatacaaacaaaaaaaatgcagagtctgtaacagtcctgtaaaggatgctacattctgtagttggatgccttccatgttctttctacagctcacaagcccacttctattcttagaaatacttcttttaataaatgatctctatttctatttctaagcatgagactctggtacagtcttttgctttgcaaagcaaggatctggaattgggtaacctctgagtgcaaatctgtggcttggcaatcctacacatgttttcccagactctttgggttttctcgatctttctctcatctcccctctgtctgaaggctgcatggattttcagattgtctttcctgttgttttgctctccctcaaactgtcataaaaatgttcttgagcttcctattgagtctgattctaaactcttttattaataaaactaagaaccacaaagggaatctcagtttccctggtaacatagccttttacatctgagcaggggacccagataagctgttgttggtcttgacttgagaacgctaagagacatgaagatgtgtctttgaaagctactaaatttgtgtgactgattacagagcaatagaaacctactaaaaatcatccaacaaggactgttacttacatcattggagttacagcaggatgctttacatccaaaggcagagatggatacagcaatgcagaattctagcatatttaaaatgagcatcaaagcatctataccctaaaaacagatttatacaaaggaatgtgaatagtgagtggagatgataagtttgaaatatgcaaccccccccccccgactactgttccaaaagaggaaagaccctggctaggggtttggaaatcaagcttttgatatggcccaacatttaacacaatttcctggactcatgaatgtcatttattttctcaccttttttttactaataaaaattatcagagaccccagagcctgctatgctctgatgttagaaatttcacaaggagaaaacaatactattatttcacttttgaggagaatagtctttcacgttggctttctaaccaagctctggaatggggagatcctagttttcagtgggaatgaaggttgtttatagacaatctaggcagacgatcctagcctctgcagggtatccaagttattatagcatcttcacaagtagaagcaagatgctgaagaatcaaaacccaagtgactgaggatgctgtagtgctaaccttgaaaattgaggacagaatgatgagccaagggatgtaggtggaaatacatgtagatgggaggtagaaacacaaaggccaagaaaattaactttccctaaatctcccaggaaggacaacagccctgacaacattttgattttatgcaattgatactcattttgaacttctgtcatcttgcaatacctctggattatgcactaatttgacagcagttgccacaactatggtaaatgattggagtgttgaacaccatgttctttagtattcaatgtacttgactttgtttgattcttcattaagccacaggatcaaaacagaggaacaaaaggtgtcttatttgttctgaattctcttgccttgaactggtgcctggaattgttgggtttgaatattctgtcttttcctctcagtgatcagaaatgctccctctcctatgaattagtcagttgatcaggatcttggcacattagagatactgactcagtgggccctgagaatatttgcatttgttgtttttatccttgttcctgccccaacagatccagtagcctccgtgtttcaggcattgtgtgatgagggatgtccttctgtatatgattctcttattgggttgatgattaaaacactgcgtggccaatagaggcaggaagttaggcagggctaggaaatgaggagaattctgggaaagataggcagggaggcaccagaaaggattaccactgagggactgggaggctaggacacaccaaccattctttggtaagataaggccatgtagaaatacatagaatagtagttatgagttaataattaagacagagctagccaataagaagccctagccattggccaacagttttataattaatatatgtctccatgtatttatttgggtgtgaactgactgtggaaccacactggaatgaaaaaccagtaacaattgtggcaggcacaagtggagaacagcaagtaaaagagatggtagcctggtcctcagaaatgtgaccacctagataggcagattaagagtgtctttgaaagtcagagagtacagaagttaggtctgtatgcctcaaattctcccttacaaatatttaatcactctcatatgatctataaacagtatccacataacatattttagttcacataaacaagtacagactgggcctggtagctcagttatattatattcccaagactaagatgagatggtagtttttaatccaagggcagcccaggctataaagcaagacaccccccctatgtccagaaatatcaaacaaacacacaaactgaaaatagcaacataaaccaaacaaaaggaagattttcaacatgagtagcaggtgtatatgtaggaattgttatttttctagtcactttggctgatcattgacaatttcatgtggcttgtctgatggttccaggtaacaagtacactatctgttctttcttacaaagaactcattgttttaaacctgttttgtaaaatcataatctgtacaatatatcttttctcccaagagttttggaatccccactattaggaacttggttttattttgggtctctttggggtgccaactcaaggtcggacatgacatatgggatcctatgtgtgtgaactattagcggttttctttttacttagttatagacagaagggaaatattccaatgtcacctgatccctaaataactgttctacttcccaatcattcccagctccccacagtgatttttacagtcatagtgctgattgtcttttttttttttttttcaggaatcagtgagcccttgcctccactttgcatcccaacagcagaggaaatacttaccacaacaattttaccaagtctttcagctacactaacagtcacactgatggcactgattatacttgttgctgcagccaccacagaactaatgatgttcaaacttagactgccggcgacctagaaaggcataggagtcagttcattcaacagcatccttggtatatagctccatcaatattgaaacacaccatgactttttttaaatgcatttcatcctctttttgccaaaagtagatgtgtctttccttatggtatctttacttccaatcccttgccaaagtaaaaacatttggttgttcctaagactaaatcccccagacaattctcaaggacacaagatgctcttcagatttcctagtgaaaatttcagtctttgacacgttatctggaaagccccatctgtcatttcccaccacactttgctacaaacgccgagtgttcgccttgtgtaatgctaataatcactcacagccatatccctcttgcgtatttccccctatgctgtagatctggctccacaattttcttcctgttgttcagtaaaaccagctttactaagagaggtaaaaccactcagaaaactgaaacttgctgtgtctctaacttgaggtacattttaatggtcaaagctggttaaagatgctaaggaggtagataggagcccaggtatagaaaggtcacttctacatcatgctacagaagttgacatttacctgttgcaggaagggaaattcaaattcatcttttagctagtgaaataattgttgaaatcctggctattgtattttatcagtcttttgacagaaatcccattataaatgtctttttgagatcgtttattgttttatatgtataagggatttgtctgcatgtacgtacatgcctggcgcccacataagtcagaaggaggcttcagattccctggaattggatttctatgagccatcatgtagatgcttagaatcaaacccaggtcctctgctcttaatcaccaagatatctctatgccctctgtaattaaaaaccctattgttttggatacatttgtagaagtcattttaacctgtcagtcagtgatatttctcccctgaaagtagctggtgccattgtcacaggataggtctgaagcttcaaggttcacctgtctaacacaacttgacattccttctccagaattcacttcaccagaaccaatattcttctaacaactgccttgacgaaatatccactcagatgagacccattatgaaacagtagctcagctacaccttcgaaagtcagacccttctaaaactcatagccttgaccttaagaaaatagaatcaaccacttttacattttagtagaatatgcattgatgaaatcattctcattttatggcaaaataaaacaaaatacacaccagactctccgtagttatcactgctgctgaaattgacaaggctcctgagagtaggaactggtcataagaggaaaaattagggttaaatatctttaaataattattataaattatagcatgctaaacttacttctaaatcaactagatctgttaaggtgatcagttgtcctcacagcagtttcagttgtcacatactgtccccttacccacaagaactgaggactgaagtcagtcaatggaagaatgagggtttcttttttaattacacaactatcgtccaatcaaaattgttaaagagcaatccttaaaacaagattttgctcacatgactcccaaacaaaaacagaacagaaattattcatgctgaaaatgtatattggaagctataaataaaataatggcaaaaattaaattctatattagataatcacaagaacattgaagctcatttgagtctatcaatttggcaattattttcaatttcttccttttttcatttacaacatggtacttattaaaataacatagtcataatacaaggaggagaacatgtgggtggctaaagcaaatgggtctcttatacactgcactgcctgctgaattgacctctttaaactatttagttggatacatagatgcctgcatttcttttcaaatttttgtttagaagatttacaagttaatgggagcatcagtaggatcacatcattgaaatgaaaactaagatataaatgtaaagctggggagattgctgccaaccaattgtttcacatgcaggtctgaacccttataaaaaattgagcccttgggttcgatcctccatcatgaactgtggaagttggtttccaagtagagcaaaggggtcaagaccacgctgggaaaactcacagaaacagcttacctgagcaagtgggaactcaaggacccaagtctgacaactggggaaccaacataggaccaaaactggcctcctgaatgtgggtgtcagctaggagcactgtgtagtctatggggcctctggcagtggaaccaggatgcatccctagtgcacgatggacttagggagcctgttgcccatggagataatctcttagcctagatacacgggggagggcctaggtcatcccccagatgacttgacagattttgacgatcactcatagaaggcctcaactttcctggggagtggatgggggatgggatgggagcttggtgggggtcatgtgaggatgggagggagagggaactgggattgatatgtaaaataagattgtttctaatttaaataaaatctataaaaaagacttcatagtaaaaagcaaaaaacaaacaaacaaaaaagaaataaagataaaagcacaaaacattggtgaggagatatatgagattctgagtcctcattcctggattgaatacatcttgagtatattaacctttcctagtctcatttttgtcatttatacaatgatgatgaaagcaaatctctcagaagttgtagtaattggttgaagcagaacattacatacaaaaacatttagcaatatgtccagattatagtgcagtgaaagctgttactggtgttttgggtggtattatcataatcattgatattattattgatatgtcaagtgctgtgcaactttgaaaagtatgggagcctgtggcattccttaaatcttttttatttaaatttaaaaaatttacatgccagcccaagttctccctccctcacctctcccccacctctcctctttccacaccctactttccactcctcagagggggaacggtctcccctggggaatcaacaaagtgtggcatactaagttgaggaaagaccaatcccctcccctgtgtatcaaggctgagcaaggtattccaccacggattgggctccaaaaagctagttcatgcacctggggtaagtctggtcccactgccagagccccctccaacagatcaagccacattcatagggtctagttaggtcccatgcgggttccccagatcccagctattgggagctcaaggactatggactgacaggtggggaacctgcattcctcaaatcttaaacacctgttgtaaataggaagggcacatcaaagtgccatgtctacaaaatagcaattttctcattctcacatttatcaataactagaacccttataacagttgaatgggattctcaattgtagaataaccaagtttatgcattttattttccatttgtctgctcataatatataggtaagaaaatgtttgataattcatacttgacactctgaactctaaagaaactctcttaagttttattataaagaaagattttttatcttttaaaaattcttattcaaattgttgattagttattttattgaaaaattgaatcaaaatttatctagttttcctattctcttaagataagcatttactgagagttgactagccagacattgttaatcgcatgctcagctttgtctcctcttccttgctaacaacaccctgatttcatcccttttttcatgatcctttcccagctacagaagtcagtctcaatttccccaagttagagatgtgagctaattatccttgacttaagaatacactcataaaatatttatgagcagtgaaatagatacatcaacaggcaaagtgctctgtcatcaagaggcgctaccgaataaccaaccctaggaatgattagcctccagactcctgatgaaattagttgtgccaatgtttaagtaactcttgtgggagtcacagtacatgagtacatgatgtcacggtatcctaaatggcatattaaataagcaggtcacctagtttatgtgaatggtatgttgaaactgcaacacaaaaaaaggaaaaaaacctgaataaggtttagatacactgttcccaaacttatagactacttgaaagagcagactgaggattccacccaaggttcatggaatcacaacagaatgttattatctccagttatgtaagatggcatgttactcaccacgattgaaccccaaactggggcccatatgtgcattgataatggagaatgaagaatatgaatatcttttgtattgttcactatcatacccaagctgaagtaaatgagagcaatcataacttgaacaacctagacacaaaaaagtgaaacattatccaccacaaaaatgatgtccatgctaagtactatccaaccactaagttacctttgtctccacctttaatattcacagatgaattttgaaatattattctcttgtcaataattttcatatacagatgggatgtactaacataaaaatttcccttagaatctctctctctgtcacacacacacacacacacacacacacaaacatgcctacattcccccacacacacatccccaccacacacttgtttcaataatttcaagcttagaggggatttataaagttcttcccagaggtccttttatgatacccatgatgcatctctaccactgaattatcctttgtcacatgcttacatatgaaagactctggaattaggaagaaattattccaaaaagaagcaacttgaagaaacaaaattagatgcagagtgaagaaaatatgaagagcacacatgatcttctttggggacttggagtatgaggaagggttgtaaatatggtgatctaaaaacaggagaacccccataataaagactaaagaaaatataaacaacttttgaagatgtgtgggaggaaatgagaatggcgcataaaaagaaatgcatagggctatagaaaaagattggaaaagacatttacatatttatgtatgtatatatatatgttcatatgtatgtatacttgcagcaataatgttcaaagaaagagatatcatgattatgaaaagaaatggacagctggtagaagaaaagagatgagggtaagcttataattctattttaattaatttttcaatgaaaaaagacagatctaaactgagttaattttccacactttcatttgtgggaacccccagaaaggacaagaatttaatccaaaggaaaaataaaaatagagtgaaaaccgctagaattcaaaacaggaaatcaatgtagaaaacttacaaaacctaggtttattttcctttaaagatagataaaatcaattagttgctaggcaagataactaggaagacaaatgattaatactatcagaaattgtccagggaatagcactgtggaaacccaaaagaagaggccaacaaatccaatatacttagaggaattacctgagaataccacatacaaatctcagggggaaaaaaagccactatgaatggtcttatatcacaagatagaacaattaaaaggaattaatattgcatgatattactatgatttattttaattaacacttaaaggaattaatagaagaacacaagcgctaaccaagctctcagcactggggagtggatactgtaaacataaaactgctctcaatttaaaaattcttattgatatatttaaaacacacaaattccatgtgaacatgaaacatgtatcatgaaaatgatcatttttcaaaatttacaacaattagaacagagaagtagaaaagagacaggtgtctgtctaacgacagaccttaaacctgcctaagatgttattccttgaagttctctatttttttttaggcacactcttctgaagacagaagtatgtggaaaacagaggatttctcaacatctgactagcaggagaaagaaagacactggaaatatataaaaacggtatgggtttgccagccagtgggtaggtgtggggctggaccacggcagcagcttgcatagctttttgtctgcattgaattagatgatcatcgtggatgatccacagcctagaacatacctgaagtttctatattttaaacataattaaattgaaagtctggtgtgataggataacatatccattttcaaatgatagatttgaaaaacaaatgctagtgaccccgggatgtgttgaaggaacatgaggctcatgggacagagtactggtgttagttttttttttttttttttttaaccatttatatacttataaaatcattctcccctcagagcaaaaaaaaaaaaaaagtcttaccccaaggactttgggttcccccttcaagaatttctctgcattctctttccacatctgtggccttaaaataaacctctccgaagtctgagctcctccaggggccacctctgtggtggtctgttctattcctttcatgggtgtcatggcagctgaagcagtgctgaaataagagagcaattttgaatgaactccttgaaatgactcaatgccaggttcctgccttaagggtaaattccaaactaaatcctcctatgatacaataaaaattttagcttagataagttacacaaacagtttgaatctcttggtaagagaagctcttgtattgttgttttcttagccttgttttgaatgctatgttcaaactattagaacatagatagccatgactttggacttcattttcaaatcagttgttggagcatttgtacaagttgacttcattttggggaggtttcccccagctccctatctactgcaccaggacaaagaaatccaccactcttctcatgcgttctctggtttccatcagatacaacttttccctgcctgtacactactcaaggcaagagaggattcacgcagccttggtacttccttttcatgttccataaggcaaaggtcttcttaaggaaatgcaaggtgaagggtgtagtccactccaaggcaggactcattcgctttttataaagggcctttgtgatgcctctcagaaataccttcagacctctgggaatgctgactttcttggttgtctattaacattccccttgtgagtcaatgactaaagaggaagactaaggggaagaatctaaagagtgagcctctcttttgttaaatagaaaacacacacacacacacacacacacacacacacacactcataaatctctacaattttctgataattgatggtgattaggaaatgaaacatgagcagggaaaagcctggcctgagatctgaaaaacctagctcttacatgaagatgtgaatttctggttattaagagtctctggattactttgactgcgcgcctgtgtaagagtgcattgggcaccattgtttccaagcttctttctgatcttcacactgctaaaactctgctcagtgtcttccactgacaaacatttgcatcagcaacctcatctcatggcctgtgcccccctaaaggaagccagaaatgctagtcctggtcacaggccaactcaggagcagactaagcatatcagactgggcactcgggctccatcctctgtatctccaccaaactctgcatggaacagatactgtcttaactgatggattttcaagatatatgtaggagatagagatgaatattatggaagaatgttattaagagtgtgtgaaatgatcagtcaataatttggatttttgatgccctgggactagaaaaagaatagaaaagaagacaacctcacacagtgcccagttgggacctttatcttttcttttactttctttattttttaaatgtcactattttatttttgagaatttcatacttgagtactgtatttacatcatttacacctcatcctctcctccctccaacttttcccgtgttcccccactctctttcatatttatgacctctttttatttattattgatatatttgcatgattatatataatacagaaccatatataatatagacatacatatttataaacatacaacctgtggggtccatttagtattgctcgtacgtatattgtttagggataaccacctaggagtgaataacccatcagggagctcattgttggagaagactgattctgcctctcttaatagtcagtaattgaccgggtggtagtggcacacgcctttaatcccagcacttgggaggcagaggcaggcagatctcagtgagtttgaggccagcctggtttacaaaatgagttccaggacagtcagaactacacagagaaaccctgtttcaaacaaacgaacaaacaaacaaaaaatagccagtgattgtctgcagttcttcatctaagggtgaacatggcaagatatcctcaggggtacaatagtggcatgtatgccttgggggtagccaagagctgtctaaatggctttacagaatactcaatagaaggaaattcatatctggtactgtaaacctagccacctacctgtggctggtgaggccatagacccggagaacaaaatattgctgccactttaccaagcctttgtcttttctttatccttattctttgcattgaaaactgcctccccagctacatttaaatgtctgctcaactccaaatcaaaatactagtgtgtgcagtgaaaggtgatctcattttttccatctagatgtcctatattcatctaattaaaagtcctatattcatcaaattaaaagtcatcacgtggaaagcctaggaagccaaatccttgcacctaccttcttccagcctgcaatgcctgcatctgtgtctgctgaaggccaggctcagggaagtacctcagtctttgcacagacctagtgcccacaccacatgcagcacctcactgagatgaaatttgcatgctgcttctatcatctttctagatcataaacaccgtggtgtgggtttctgaaagaaaaacagctacttcctttttttctaaatagaaatggttaactttctatttctcaattagggtgtatatattactgtaagatacactcaaaaagagtggctgacagttttccttttccacaagaaaatagtaatgtttattgtggtgataaggatggagacttactctttgtaaaactctgtcaaaggaatataaacaaaatgctatgataacatgaaaatattgcatgacccattgttttgtatattaaaattaataaaagcaaaactcaaactaaataaaacagaaataccaaagtataacaaatatacaattttaaagacaacatactcaggctaatgtcatttagatggcctttcaacatctttttgcaaaaaattatacattgctgttactgtgcttttctgtttatatagaatttaaatgtactaagtgttcatgaaactcacttttgttgttgagtaaaggtatttcaaagtagaattgatgtataggtatattggcaaagctctgtcctccatagggatgacaaaacatctggataagtttttctattggttgaaataatgacacaggtattgagaacatacatttctaatctaaactcatatgggaatccctaagattatatctttattagtgttttgaaactacaatcagattgtcaaagattccatgactattttggggctattttggttttttttgtaatgcaaattcgtttttttgtacttcatacatcagtactgcgtttatagtatttccattctttctatccccgctctgaatcctctcatgtccctcccaggccctttcaaattgcgacttctttaattattgtgaaacacacacacgcacacacacccacccacccacccccacacacatacatatatatatatatatatatatatatatatatatatgtatgtgtgtgtatgtatatgtatatgtatatatatacacatacacacacacataatgtgtatgtatatatactctgctgaatccacagtgagggttcctcacttaatctggcagttcaagtcagatattgtatttttgtttgggcctagaagagagtgagtattatagatgtcttcagttttcaccagtgttctctttctctctttgtgcaagatttatactttttgtttgtctgtttgtttgagacaaggtttctctgtgctgccctagaactttctctgtagaccaggttgttctcgaactcatagagattctttcacctgtcctgcttcctgagtgctggtattaaaggctgcaccaccatcacctggcaagatatatactttttgttcttgatttaattttcatatcagaatatattatttactcattcacatatgtattataattaaaatataattacattattttcccttttctcctcccaacccctcccaagacctctctctccaatcctcttgctgccccctcactgtctctctaattcacgttgtcttttctttaataattatttttgtaacaatatagcataagtatataaacatgatgtgtcaagttcattcagtgttgctggtatgtgtatgatttcaggactgaccacttagtattagataaccaattaggggctcctccctggggaaaactaattctccctctgctgtcagtcatcggttgctgtcaagagctttgttatgggtggtggcctgtgtgcctcttcccaatctgtgctggaatgttgacaggtttgatctcatgcaggtctccaacagacaaactcagttgcagtgaactcatgtagactccagccctgtcatgtctagaaggctctgttttgcctcagttctcccagacgactggctcttatggtttcctgatcctacttccacggtgtttcctgagccttggtgagagggagtgtgatatagatgttccatttgcatctgagcacacccagagacatttgttgtctgtactttgaccaactttgggtctctatattaatcgccgtccactgcacaaagatgggggagggtaatagaagagatgtgatatgaaagcagagtgggagccatggcggaggcctgggatggggggaggtcaggggacaggggaagagacagtgagaaagataaataaaaaccaagtctgagccgggcgttggtggcgcacgcctttaatcccagcactcgggaggcagaggcaggtggatctccgtgagttcgagaccagcctggtctaataagagctagttccaggacagcctccaaagccacagagaaaccctgtctcgaaaaaccaaaaaacaaacaaacaaacaaacaaacaaaaaaaaacaagtctgtattgggtgccccaagaaacaatctgtaatccgtaaggttgagatatctttattgagataaataccagccaaacgcaagccagagcatgccaggggcagccgagcagcaaggccagagggaaggggcagaagaaggggcttccatgcgctctgtggtcccttaagagcccatgctgcgtcatcctgacctcaccttgaccatgccatcacaggcgtggtcaggcacacctgtagccagcttctaacaggggtggcttactgtcccctacaagtatgtatgaaaatgccacacaaatcccattaccttatatgctaaatgtttaaatgtataaaataaatttttgaggcacaatatgtgacaaccaaagcactagctattctacctgtgttctgccaaattactacaggtcagtggtctaggttcttagtcatcccttgaagaggtgtgaggcacagggagatttggctgtatttctgttgttttcaggggtacaagagagaaagagggggtatctcaagatgaaaactcatggtgtgatgtacccgaaacccctcattctattccattttctttatttcctaaccttaaaacttagattattttctctaatatctcatccgaattagcagataacacatggatgcaatggtttctaacttgtttgttctgtaatcaaaaataaaacacacttaatgcatatctaataaatatgtctagcaatattctgacattcatggcatcagaaaagagtttaattaggtatcttcctgcttagtaggaagataagggagataaaaatgaattaaatcttatctacatgtcctgatgtacattcacttagacaggggtagacattgaccttgatagtctgtgctacattttttatggcatacaaaagaagcgggggcggggaggagaagcaaaagtcacatttttcatttcttgaaggaaaaaagaaaccacagccttaaatctgttgctttaaaaaaaaaaaaaacaaagttacacaaacaggaagagcattagacaaagtagcagaaatgtgtagtcagtgtgaaaatctaatgtgattaaaatcatttcacccatttacttcaaaaccaactttgctgatttaaagcacttttaaattgtcataagtatgaataaaacatgttcaaatgctatttagctagtaaatggatgatatatgtattgctttctgataatcttatgaagagccagtggaatgatctatcaagttcctggggaaacatgagagcatgtcattggaaacttacacacacacacacacatacacatacacacacaaatacacaggtatccatatcagagctggagtcttgtgcttccctgtgtgtggttcttgaaaaaaaaaatcaacgcagatttcctggaacattcttttcttggtgtgctggtgataccaaacctccttaaagtgatgtaggatatgctgtttctttcctgggaggacttgatggcataattatcacgacctgtaaagtcaatcagatgttattacattattcacagaccctcagggattcctttctttacccacatattgtcaccatcaccatgctcaccctgtcactacagaattgaatctcacatcaatctgatggacttctcaggcatcccttagatcaggctacacctaagacacacattcagttgtagaattttatgctttaggaactttgaatgttagagtggaacactatgaggtgtgaatgaaagtacccatgagtttgcttaaaatgatgttttatagaaaacacagagctcttttcccaaaccaatttgctagtgctgatggcagcaggatacacaaacaatgacttggttgccatacacaaagcaatgataactggactggctcagagtgtcaggaagcaacttgaaagcacgaataagtctcatccttgttctgcaaagtcgtctgacatagagtttgataggaatagctgaagatcctggagattattagactgacattatatgttacttgccattgcaagtctagactcagagaacttgggagcaatgcttctcagctttactaccattatagtgttcacaagaagctcagacttccaaatagtaggtactaaggtctgaaaggtatgaaggagtttgcctatccaaaaatgcttcatcactcagtgaaatcacaaaatcttctgtgatacccaacatacttacaactctaggacctgaaattgaaaacctattatacacttctctgtgatctagtccaatgctcttctttaggctgagcctgtggatatgtagatgtggtgttgcctaggagctcccagaaagaggaacagaaagatacagatgagcacccagtgatctcatcattttatcatcacattattattggctgtgagtcctgtccatcacttggcatgtgggcaataagactattgagcggctgtggggttttactactactaaatcagtctagagccctcaatatttagagaacacaatggtcatactcttgtgcttgcctacttctgtctctgctcctattacccactctttgagatcatctttctgaacagaagtcagaaggatcttatacaagtatcagggtaagccaatgcccaggtgagtaccaagtgacagagaggccttatttccaatgtttctttgtagccagagaaagatgctatgataaaagagtggagtaaatctggtaccctctgtggacttctaagatgtgaattgttctctggtctggactctaaggggttgtcacttgcaagaaaaaaaggtaaaaccatactatgtaaaacagaatgtaaaacaaaaatcctagatgtctttcagtaagaatagaagagcatatcgttcctatgagtaggccatatatcagttgactttgagctaattaacaattaacaacattctagatgaacctgttcaacttgtgtgaatcaaaagaactcaagacatctgtcccttggtatcttcaaagaagtgactatcctactctctatacttaagaggatatgaattgtgccatgtgactgtataagagaagcttgaagctttgacagttcagatgatcccacagatcatccaactgcacaaacatgatctttcgagaccttgaataggaaactcagctaagctgtgcccatactccccccatgggagctgagaggtgatgagtgagaactgtgtccaactttcatgttcatgtgacttattacagagtgacagaaaacatgaagagacatattcaaatgaaagccaaaacttaccccaccagggttacagcacatcactctgcatccaaaggcagagagagacacaccaatgcagaactccagcacacttaaaatgaccaccacaatatccagaccctgtcaacaaatcacagtgcaagcatgtgaggagttggggggtcacattccaaacatttctacactgagagagtggaggcactggccaagaacatgatttctggcacagcctgatccttagccagttcttggctttctaaatgttgcatattctgtcattttttttgaagcacatacattagattaggcccaatgaccctgttgtctttcaataacacctgtagctgattcttgctaatttcatgtagtacagtccagttatttcacatagatatttacctgttctttcttacaaagaactttctttacctaacctttttgcttatagtttcatgcttcataatgtatcttttctttttcacaaaaagatgagggcttcttgaattaagagagctgtttcttaactttcacagtactaaccctgagatcttacagaaattatgtgctccagagacttagaagatggcttagctggtaaaatgctttctatggaatcatgatgagctgaggttagatccatagcaccgcataaatgccaggtgggcatgatggcctgcattcaatacccacatgaaggcaggaggttcttagaataaaacaaattgctagacaagctgaatctgagagttgtgggttgaagtgagagaccctgcctcaaagtggagagcaagtaagaaagacacctaacgacaatctttggcacacacacacacacacacacacacacacacacacacacacactggcacacacagagacactcatgagaacatgtatgcatatattcacatataacacacaaacataaaagtgtgtgtgtgtgtgtgtgtgtgtgtgtgtgtgtgtgtgtgtgtgtgtgtgtgtttcaaggtctgtggaataatgtcactggttcccagataggaacatacttgacacttcaagaataatgaggcccttccttatggaggacctctgatggcgcagccatatctgatgggaacagcaaaagtcaataggccagcacagccacttgacaaaagtccagcaaagctgagccacatgatggctgtcatgcctgttaggataaaacatgggtgaccttgttggattccatggaaggtgaggggacaaacaagccagtcagatggagctttagtgaaaagttttattagaaagtgaaaggggggaaggaatgagaaaagaggtaaagagacacagaaggagagaagggacagaagagaagagggagacaggaaaagtcctgtctgccccaggggaacagtgggaaagaaagagcagaaggagagcataagtgggtgggggtcctttaaagcagtcctttgcacctgcatgctgaccagggtactgcctgagtgcattctgtcaagtgacaggggcaggtcaacataatgcctgaattcttacaatgccacctttgcttttcatctctacctgttgcatatttgggtgacttagtatttgttacaatttggggatattggattgatggaaaatttcttatgaatcatttatgccttctcccaggaatgctgtttctaagcttcctcaggaaagtcctgaacatacttttctgctttagggagatatccttatctgcttgaaggtcttccttatgccttggaggctgtgacacacataaagaagccagaggtctctttatgaggctacgaggcattcttgaaacatctgtccctgtacttatgcaggaacaagatattcaaaatgaaataaactcaaaaaggtcaataagattcagtgggctacaggacttggccacagttcagattgcaagccttttcccactatacgctcaggcaattaattatgtggcatatacagtgacaaaatcagattggctgacgttacctctgctctacacagagacttatattaatgagcaaagtatggagtggaaagatgataaaatagtgagatgtcaggaccttgctttcttagaaaagttagcacatgcaaagccactgtggtgtcatatgaccaagaaacaacagaacaccaggattagacatgtagacaaattctataaatatataaaatgtgaacattgtattacgccagaatttaaataataagtacagcagctttggcctgagaatatttcttgggcactctgaccattaagtgttaataatacactgcttgggacaggagatatgcccaggatgtcttggagattattttggtctaaagtccttgaagccataaaagctaccagcttgagaacaggctgtttatgtgtctctagattcttaataattgggttatggggttaatgagtaagaatgattataaaagataactgttcatcaatgatgtcaaaacttgagggaaaatgattaaaaatgatagctcttctgtcatagtttattaatgaacaaaaggaagtgaaccacatgtctgaaaacaaaaatgatacgatttatgttttggaacaacatgaatgtatccctgcttactaaactctgtataaataaagatgcactctggctgctggattctccccaccaccatggcctgactccctgcctcccttgcctactctttacatcccttcctgagtctccatctgggatgagcttcctctctgtccgtctttcctaaaatgaaagaagtgtcctgtgtctgatttctcctgtcaccgctcttgaatccacccatattcagatgctgccctcatccagagctggactcgggcactctgatgtaagatgaagcaggaattaaaagaaaaaaaaaaagattcacaccattcagaagacttcgtgagcataacaagaagatggctgattgtgatgaaagatgattcctttgtacagtgtgaagaaagcagcagattttacagcaagcacagagctcttttaagcaagaagtattgtgtgaggtcacaggccctatggccaagaaagctgccttacgcagctttcaattctagagctatgttcatgtcattgcaccctggaggcctatgaggtaacaggccttcagaaatagcaagcaagattcttcatcagaataactacatagaataggtaaattatgggcaggaaattccagaacttatctttgccaagttctgagtgactttggaaaattgtttcatccgctaaacatttgtatctcgttttgcttgagtgcctggcggttgaaatgcttactataaagacttataggatgttcaagggggataattagttatcgatggccttcatgcaattgtgctgatgtaaataaatagggcctaatattcatgaactttaacttggaatcaaatggacaatgcagtttgttttgcataaggagggagaatgttgattccttatatttacctgcattttcttctcctttggtctcattgtacccagggatctgagtgtgagatgtaactctcattcctaaacaaaggcttgatttgtttctctatggtttctaacttcttagggggattctataatcaaggagtgttattcttggttttgttgagtcagtttgctccagccttgcttcaaccataatcccatgaaaacagaaaccactcaccattaaaatgagcacggtcatgttgcagctttccgaagagcttctatatgtacagtagtagtaatggaaagaatgaatgcttgggctcagtgagctgattatgatccccgagaaggcaaacacagaactggtgatgttcaaacctaggctacttcgaacctagaaagaataaaattgattaattcagtatcctccaatatcctcaagtttatctccacccatcaccttaaactctttaattctttccttacacatttcatcctcattgttttgactaattcaaaagtattccaatttgtctctactgttattttcaactaaaatctcttgttgaaacaaaaatgtgaatgtcatttctacaattaaatctttcagattacccctacagacgcatgaagcatactccaaatttctcctaccagggatttcaaaactattatatttattaaaaataagtttatttatttggatgtttgtgcctgcagaggtcaaagaacttttggagttagctttctccttcttctgtgttggggtaggacattctcttgtaatttctgaagcttcatagctcagctcacctcctatatgtcctggggctcaaactcaggttataaggcttaacaccttcacctgctgtgctgtctccctgggctgtctatcatactccagctgaagcaggagatctctatatgtgtctcttaccattctctgttacaagataaccctgacttctgcttagataaatgctgctgagcgctcgttgtccatctcctttgcacatttccttctctgctgtttattcgtttcttcaattcttttctagtattgaaagtatatcagcttttcataagaagcaaatcttcccaggaaagatttgtatcttgtgagtggtttggtgagaatgtagcacggcaggtatatactaatggtgaaactaccagatatgatgtggcacagatttagaagtgttttaaacacactctagagtttaatgcatctcttttgagtaaggatatgcaaatatggtcctagcaagtatcaagcttgttgagatcttggtttggagcctttttcttggctctgtgacagatatcctggcatgttatattttaaatttgtctcttcctgagagataactcattgtgaatttgttttattgaatatccaaaatcttttctagatacaattagaacacacattttgatcaatcagttaataaatgctatgtctctaaaatgttgagtgccaggcttatgggcgtggacagtaaacttcaaggtagagttgattcatagcccttgacttgttctcccgaatctccacatctgtaccaagattctctttgaaaatcactgatacatattcaacctgtagtcagaacttagctaatgttttgactaaaaaatttaagaggcagattcttctagatgaaataaaaactctcctggaactagctctcgtagaccaggctggaatcacagagatccgcctgtctctgcctcctgagtgctgggctcctttgctttttagagattaagattttttttacatcctggtagaacagatacttggattatatccctcctcttttgacaccaaaatagcattaaaaaaaacctcaccaagccttttgtagttcttcttcctgctacaattgagaatgatcctgaaataataaactagaaataagaggtaaaatccaggttaaaatactttatacattattggaaattataatatattaaagcctactcctaaatttggtaatatatgtgaaacagatcgattatcttgaaagaaccacaaaagttaaggaagtttccccccttttcctagaaaacagaagaattctaccagacaggtaactggtacaattcatcaatgttctcaattctttgacaatttcatccatgtttatattaagtgatggtcacttcacctccccaccccattaccctttctcatttcttcttttctactgaagctcttcttcccaatagtttttaactataaatagacacacacacacacacacacacacacacacacacagagagagagagagagagagagagagagagagagagagagagcgcccaatgaacatcactgaagactgaatggaaggactgtaggagctaaaggacaggaaggaatgtgatggagtatagtattctggatacaacatggccattgcaaccatgaacacatagaatctgtgaattcctatagaggccctagaaagtagaatgaaagggagtgaggaagggagggaaggaggaatagagggagggaacaagagtgagacagagagaaagagcaaagacagaaagaaagaaggtggaagactagttagaggaaggtagttgttagttgtgtgagagggatgagagaggggagtgcgggggcagatgtaagtacagtgtactatatacaaacattctatcacctatttttcaaaataattaaataaaaagagataagagccctctaataaattaataaatacattcaggatcttaaaaacaatgctatgctagacccacttgtaatataagatatgcaactcaccatcagagatccccaaattgggtaccctatgtacactgaaatagggagtgcatcattgtatggcacagtggtgcttatcatcatgatgcctatggcgaggttcatgagggcaatcacaatctgcacaacctagatgtgacagcaaagaaataagaaaagatcatttaccacaatgtgtgcctatgttgcctcttttacaaccactaagatactctcaatctccatttttgatacactaagatgccgttctggatagtcttctcttggtgtttttgtccatgtagctgtggttataacaacttatcaaaattgtctgacaggaagtctatcattatgctagtaattttaaagctagaaggaatatccccaagttttttccaagatgcattttctgatactcaaggtgctactgacacaacttctctccttagtcctatgctcagacaagggtgatccaagaattagtaaataatgtctttaaccagaaaaagtaacttgaagaaacatacctagcaatagagtgaagaaagagaagagtagatagagcattgtctctgggatctgggacctgagggggaaatgttaataaagtgccctaaaaatgggagaatccacagttggagaggtggctcatcagtacacaatgctcttacagaggaccagagttctgttcccagcacccacatctgaaggctcagaactaccagtactctagctcatgggcacctgatgccttcttctggtttccatgatcagcacacacacacacacacacacacacacacacacacacacacacctgtttttaaagtatgggtattatataacagatagtccaatccactaggatgcaaaaggaatggaaaattataaaaacttgggagattaaagaaaggtaatacataagaatatatattatcacaatgtatttgtttttaaaagatgacagagaaaccctgtctcgaaaaaccaaaaaaataaaaataaaaaaataaaagatgacagatctagtcaggcgttggtggcgcatgcctttaatcccagcacttgggaggcagaggcaggtggatctctgtgagttcgaggccagcctggtctccagagtgagtgccaggataggctccaaagctacacagagaaaccctatctcgaaaaacaaaaacaaaaaaagaggacagatctaaaattaactacccaagtgttcatatttggaaactcaaaaaagaaaagcaaatcaagaaagggaaatgaattttagaatggaagtcaaacatttgatagaattcacttcagataccttctgcattcactgctttctattttagaatattactaatttttagtttattttatttgatgacaccagcccattcagattttctagggtttttgtttcattttgagttttggtatatagtgttttcaaagaattctccatttcatctgtgttacctactttgtagacttgggaagtgaagataagaaaacaatggactggaacaaaatctacagttaatgtttttcactgaagagacacaataaaaatctattatctgttaatcagactagataagaaaaaaaagtgaggctacccattagtagtatcaagccatatatggaagtcagatggccctacttaaacataatgggttgcagaagacacaaacctgggaagcgaatgagattggtaaaatgagaggtggagttgataggaaaagggaagtgaaagagtgttgtgggaattcgacagcaaattgtattgggtgtggtcttctttgggggtacatgaccccaatacccaataaaagggacactctcttgggtgtaagcgagatggcagtgagccataagaacaagcatggctggtggcttggttctcatgccctttaaggatgggcagagacggtacaaactgcgaaggtctatctgctggatccccaggggcagcagcttcattctgtattgcgagtgtactttattgattgacacctgttaataaatctgacttgatcacagagttccctccctcttttgtcaagtaacaaaataatcaataaaaatggggtatcagtagacattaaaagaaaaatagtcttccctagggaggagtacaccaattggttatccaataccaaatggtcaaccctgagaacatacatacaagtaacattcaaaccgagcatcttatatattaggagcatatatttatatacatatatgcatgtaacaacaatcggtgaaaaagaagccatgaatttgaaagagagcaaggaggaggaaagggaagggaaaatgatataatatcaaaaataacggaaaaatgaaaatggctaaaattcatcatgtgaatatataaaggtgtcaaataataaaaaatagggaaatgacaaacataagtactattatttggcatttgctatgtgtaaatctgatagtgtgtgtgtataaaattgtactccatgttaattgataaaaagacaatactgcaaaaaataacaattctcaccttcaaataaaaattcaatgaaacttaacaatcctagtcattgacgttatagctctctagaattgatactcagcatgggttactacatagagagttccaggctggcattgggtacatagcagttgtggagccaccggaactcttaccactcctgtttgaaatactcaagagagcacatgaagggtgggcaatcaggcagcttctttggaaactaaatacagttttgcaaaaatccaggatttagattaagttagtaacagagacattcagtcacaaaaaactgtccccaaagtatgacctaacgattctttggattttctcaatgtctgttgttatatcccccttttcatttctgattttgttaatttgcatgttctctctctctgccttgtcagaccattctgggaaaacccatagaaacagctgatctgagcaagtgggaactcatggaccccagtccaacagctggagaagcaacataggaccaaagcaggccccctgaaagtgggtgtcagctaggaggcctgagcagactatggggcctctggcagtgtaaccaggatgtatccctggagcatgaatggacttcaggagcccattccccatgaagggatactctcttaagcttagatacactggggagggcctaggccctgccccaaaaaacttgacagattttgatgatccctcatggaaggcctcacccttcttggggagtggatgggggattggatggagggatggttggggggtatgagacgatgggagggagagagaactgatattgatatgtaaaataagattgtttctaatttaaataaaatttatttaaaaagggaggaaggaaggaaggaaggaaggaaggaaggaaggaaggaactgtccccagcatagcaatgttgaggtaatggaaactttaaaaggcaagtgtgatggctggatttatgtcatcttgacacaaactatagacattggagaggagaaaacctcaactgaggaaatgcctccataagattgggttgtgggccagcctgtagagcattttcttaattagtggttgatgggaaagggcccagcccattgtggtggtgccatacctgggatggatatcctgggttctacaagaaagcaggctgagcaagccatggagagcaagccagtaagcagcactcctccacagcctccacatcagatatgtcctccagtttcctgccctgtttatgttcctgtcctggctttcatcagtgatagatacattgtggcagtgtcagctaaataaaccctttcctctcccaacttgctttttggttgtgatattttgtcagcaatagaaaccctgacaccctgattaggacagcaaacaggatattagtgctggaactatggattgaatatgaaatgtctctcacaggcttatgtgttgaatgcttcatttcccagatggatgtgatattttgggaagttctggaaattttgtaggggaggcttacttagaagtagatcactcactaatgggtgggtccaagtggttaaggttagaattcatccttgcttttacccgtgtctacataatgttcttgtataccattagataaacaagttgtgtcatatgctccgctgacaggatgtttgagtcgagaggtggaatgacacaaccatggactgagcctcagaaaccacagtcaaaataaatcttttatccttgaagttgcttagtgacacatgtcagagtgatgagaaaaatagcacacaaaattgataccagagaagtgattaaacctggtagtacttctctttggaactggcttattggaggaatttggaaaagctttggaaaacctaaagcagtatgtgcacagatcctaaatgatggtttatgtaggagcttagaagataagaacactgacagcgacatagattgaagatctagttcatgagttctgacctatggtattgggaactggactagaagtcacacgtgttagatgttggggaaaatgtatctacaacttctctatgtcctgagattttgagtgaggctagatataaaaacaataggctaattatcttggcatagaaaagacaacatacattcaggatatgacatggatattgtttgctggctttcagatttacgatgagaatataagttaatagaatataatgggtttttttgagaatctaagttctgcaaattaaacaccaataactccaataccatttgatgcatcaaaaggctagcagcacactgtggttggtgttacattggtcatctgagaatttatagcactgttatcctctcaaaattaacataccccaaggattttcggttctcccttcaagaatttctgtaccatccgtttccatgattgtgaattcacatataaaggctgttgtcccagctgctgtgcatcatagccagcttccaaagcagtctgttctattccttgtatggttatcatggcagcagaaatagctgtagaagaagaaatataatttagggtgacttcctggaaacagggagtctaaatacaatatgacacataaatactaattgagttaaatatgctaaaacatacaaattaaggaaataccatgatatcgttctagttaatgatgtattaatctacagtctgtattctgaattgataatgtatacttacatctacttgtgaattttttacattaataatcctcatcattatcattacctattctataactggatatctccatctaatattttctgtaaagttagtccatagtcataggttctttctttcagcactttgagtacaccaatctagtgtctcctggaacacagtgtattttgctgaaaaaaattcactgcaaggctaatcataattctcttgtgtatggaatgtttttctctcaatgttttgaaagttctcttgtctctgcttgtcattatagtaggagaaaatatatttggaacacttgtgcttacaatacctagatttccatgtctctcctaagacttggttctcatgaataaatattctattctgactttttatcatttctccttctagttttataatgagaaaatttgtttgctatagacatcttaacagcatcttaggatcttttcacacttcaaagattcctttcttatttttttttctgctgtggaaaatttcaaaagaatcattttttaagttctcagatttttaaaattttctgctgttaaaactattgtatcttaattctgtttattgagtcttcaaactttctggttttgtgatatgaatctttgtcaaaatttttattcgtaccatgaattttcttgttgcatgaattgtccaagtgtgtccttttgtagtttactgaatttcttaggattataatatggtatgaattcattatcaggcaactcatgtatttctagtcctgtagagtctgctattgaagaattaatgtatgctcttggtggagtcatatttccttgattttcagtttctctaaaatctttgcatttgtgtctatatatcttgtagaggatgtcacgacagcagggttgttaagtggtgtacacattatgctattgagtagtgatatttcaacctatctatagactttatcatcccctgagcagaacacaaagtctaaatttgtaaaggttagaataattttaaatctaacatacagcaatgggtgtatttctacttgtgaaaattcaacttctatggcatcaatttaaatcctaataaatctcaaacacattcatccacacacacacaatcattcatgcacgtgtgtacattgtgcatgctcccactctaagcactctagcttcatttgctttgtgttgattttagtgtccgtattttcagtgtcccccaaaatagaataacaagagacagatatggcaagaaccctaaaagtgctgtggcaatctatcttcccttccttcatagaaggcccagcaattaactcagtcgaccatattagaaaactggttttctataatagttgttcttacctgccttccatgcccagtaaataattcttccaaatctacatttccttcactttagcaaaggaacttgtcatcctacctgacaacctttaggcattccttgggtccatttaacccttgtatgcttattcttacctcaattaataaccacaatggctgttttaaaatataaaacaatttaaatttcttataaagagaaactcacattttattcccttttttcttttcctttcctttttttgtttgttttttgttttttttgtttgtttgtttgtttatctgagacagggtttctttgtgtaacagccttgggtgctctggaactcactctgtggaccaggctgccctctaactcacagagatccacctgcctctgcctcctaagtgctgggattaaaggcatgtgacacattttaacgctaatctgtattctaatgttacttttattttttcctttttgatttttggagtctcaaatacattgaatatatttgtttgtctacatcgacaattttattcctgcacattcagccaccttgcagtatttttttaaccacatcccttttctgctttgccaccacaacaaaagcccattctcatttcttcttacacactgatagtatcacatgtgctctgccttccttcatacacagctcccatcacacatggccaacaatggtaaggaagtgcttgagaaatctgtgtgacttccctcataagcaatagcagacaagggtgttgggaaagtaatgggtatttcttttcagtcaaatttaatgtgtactttggtttatttgtgttttttgcaattatttttgtccttatttttccaaacatgcattcagaggatttagaaaatgaagattctgtctaactgtaactactaaaacctaagcaggtctagggagagagctctatccacaaagtgtttgccttgcatgtaggagaactttcacatgatccccagcacccacgttaaaaaattaaaagccagcacagtggcaagggtttgtaatctctgtcctgggaaggcagacacaggtggatcatggggctttctgacccactagcctaccctaattggcaagatccaggccagaaagaaacccttagcaagaaaacaattatatataaccagagaaatgacacccaaggttgactgctggcctccatatgcatgtgtacacacattcaccagcatacacaccatcaatcatacatatgtatagacgtgtgcgtgcactcacatgcacacatactatataaatactctagctccactcgctttgggttgattttggaaatcactgtatttgaagccaagccactgagcagtgcagtactagtctcctaagatctttgcagtagatgtcacctctttctggaatcttctaaggagctaacacagctgctcttggtgaatattgtcagtcttttgtgtccccagattttgggtggaatgttgccttttaccttcctagtttttgatgggatatacttaccctaatgattcattttaggataaactaaaatggcacaaccataacacttaaccttcagtatattttctttacatttccacagcccagcatgtggaacagttttaggcaacagctgcctgtgcatcagcaaagcagaacattccacatttgtaactccctgtcacctgcacatgttatatgtctaaacagatcccctgtataagcctgtgtgagcaacccataagaagatggccttgttgataatagtgaccgttttccttgggctgccaagcttcaaaatcaatctctgtttcttgctccaacaactgaacttccgaacactgaccttttcaagtggctggctatacacttaggcatggcaatcgtgcataacagccttgggggttctgagtttgtggactcctttctagttagactggaatcttctccaagacagaatctgtatcaacagtgtcccctaccatattttcatgattctttggtaaagtgagttatggtctggatgtttgaggctgatgttagctgtttctaaggaactctgcaagtacattcatgcagctgctccctacattcacaccacaacaaatagactttttgacacaaggcaaataaattcctcaaagacaaaataaattgtgtatttatgttctagagctcagtgctccaaatttcatataaaccaaagaatattacatggacatgagggatagttctccatgctagggaggggtctgtcaaggttttacattatctatgacatttatgagactattggcaaggatagtgtcttcattttttatccatagtacagagatacagaaaaacaggcagccccagacgttccaatagcatcaaactccttgaggatcagcaccaacaccagtcacgtttcctcacttttatatgaacatctttctcatgggtcagaatgatctagaagaaatcaagaagattgtctaacaggccagcctctcataggacaagattataaaataaagtggtgactcaataggaagtctgaacctagatgactctttgtacaaggtaatggtggaaatgtggggaaaagatgagctggggctggggagtcctggactaagatccaggaagtgtgggttgtagttcaagcacacagaagcttctagtccttgtttcttctgggtatgttttgtctcatctgagcaaagactgcacacagattcctctgaccctaacccaagggccacactaacaatcttcaagccctcttccattcctaggtttcctatgagaagcttaagtttatggtctgagtgtcagatgcatgaataggggacttacatcaggtcacaatctgtctcaggattggactaagtatgttagacaggggtctcgactttctcctacatctacatcccccacctacatccaccgcctcctgcacgtggaggtagtttcttaactgatgaactggaaaagtaacacatactggaggagaacaaatacagtgggagaagggacattcagaatccatgaaatgatcaaaaatgaaagcactgctttctgtttttaaaaccgaaagcaggtaaaatctcatacagaacccactttgggcttttactgggcctttatttgtttttcttgccccccagtattgccgcacagattgctcctcaatgcccccaaaagtacatgtcaaagtgaattcttccctcccttcatccggaacagtggcttgtaccatgggacagggcctcttttttccttccttagtctactcccaggtgtcctagaacatgacatgaaaaaaccatcatcacaaaaggctgtggaaggcaagtctgcacctacctttcttctcaactggaaagtaagacaaagagcagtctctaggaactcgcgttaggttcttggttcagatgtggtgaccttgcccacaagccatgcgccactaagcttatgttcattacttgttctaaatcctgaaggtttctgtgggggaatctctgagaaacacagttagttccccttttattagcagaagtatccactggttctgcctccttggtgtgtgaatgttgctttttgggaaatgtaccgaaaagcagtgtctgtcacaatctttctgatgaaaacaacagcacagcttttactgagcattatcagtgtgtgtacttaagaggccatagttaccatcattcctttcaacccatttgttaagcccatttcagacaaggttgctggtggatgcctggagtcctattacccaggagtctgagtccgaaggattgtgacttgtagccaacccgtcataaggagaacctctctcaaaacagcaaaaactaacaaatgcctgtttatgacagtttcacatattttcatgtcactgttctttttcttagaaaattatctatgcacacttttcatgtgggatttatttttaatgatatctcactattttggacttactataaatttccatcaagtggcagcatgttgattgcaaagaaataaatagtgctttgcaattatgaagtaaataacccctttctaagccaaagaagtatttaaaacaaattcaagtgcaataatttactacatgatcttgtcatcccccagaatctagaattgttcaccgataaaatgatataatccttgacttaatgtaagaagtactagtctgttttccattactgcagcaaaatatttggtgtatgatttatgtaaaaatgcatttatttcactcacaattttggcatctcaaaagcattgcattggcacttgctgattttagttagcgttctctggggaaatggtgggaaagtggctaagaggtgaagatcacatgaaaaggtgggaagatgatgatgtattgactcacctctaggtcacacctcataaagcttccatttcctccacacttcccactgaagatcacgatctcaactcacaaaccctttgaagggcaaatgcatcgaaatcacagcaaaaaggaaaggaaagtggctggcaacttttatttattcaaaaatttcttaaagacaaatttccatacattaagcaatatgtcatggttaagatggtgtagaaggatataaataaactttgctgctggggagtttgtaagctactggaaaattcagacaagtcaacacacaaacacgttaaaatcctgccttatcagttctctccaaagtaagtagaacaaaccgagcctcatagaacccagtgacctcagccttggaaataaagaagagacattccagaggcaatgacatccaaagggagaccagatgaacgagataaccagatgtaagagttggggaaatactgtgtactgattcagtagtcattctttcaaacttttacagaggagctttaaccaagcaaaactttcaccagcagatggactggaggaaatgtgatggttctctgattccagaggacactggagtgcaggatgctggagtgcaggctctgtatggcttcctccattctgaagaatgtcgtcaatgggtaaaagtgcctctgtaattgaaactgtagaagctattattagcaaggtttggggcaacacaggttttctttggagcaatggtttgagggatgtttgattctcattttctccatactggtgagacttagctgaaatgacctctcaatgggttgaatctgactcaacccagatgtagttatagcagcagtagaatacaaagcatgtgttctcagagtcattgtatatcctggaccttgggcttagtgatttgtaaagctctatttagcactagagttattagggttagagccctcatggtcttaaccagctagacactaccattcattctcaattggccagttaaagacagaactaatagtaaagacttgagaaaggagatttattccatgtagctacattgagagaacaagaggtataatgagctccccttccccccaagttctttgtcagggtctccacatgaggtttaagttgaaatcaaggaaaacacttatctaagcagtcctggcccagatgtggttccctcactgactcatcattggtgaactccattctgccctgcaagatgcaagttcttgtcagaactgcaagaaatctctttccaggagacaaatccctcttctgcttttgtgccaggactttacccattctttagtccagcacaaaattcatgggaaatttttcagtttcttgggaccaattgccaaagaaagaacacaagtgtctctttaaaacattccctttttccaggacagtcacatgtccaccacctgaaattgaggtgtatgttcagtctctatgttatggtggctaacaaccatacacaaagtcaggatctgtaactctgaagcatcctggaagctcaggaaacagtgtagtcatagttctgactctgaaagcaggggataaatactcacatggctctagaaaagaagaaatctgggcttggggcatcaagatgcaattgcaatttggatctagagccatggggactcaatagcaattgtaccattcagtggtgactatcggtcttgccttggttggacaaggcagggatccaagacttgtgagaccaggtacacagggatccaatttttaagataagcaagataccaacaaaacatggggttcagtgatatgtctgcttgtggtgataaattatttatgatttattaaagcttgcctgagaattcagaaagcaaagtcaaccacaatctctagaagctagtcgatggtggcacacacctttaaccccaccacttgggaggcagaggtagacagatcactgttagttcaaggccacactaagctacaagaaatatatccattcctaaagagaaatagctcacataaagatgatctcagcacttgagctcacatgcctttaatcccagaactcacaagaggtatttaagataggaacagggtctcagatctggattcattcttcagcaacactgaggataagaagacattcagtctcaagattctctagccacagaggagaggcagcagtctgaggtttggtagagccaggatcgtctttcagtctgaggtagagataagagctgactgctgactgctttgcttttctgatcttcagcttgaagcttgaaccccaatatctgtctctgagtccttttatttttcatgctacatctgcttactacctgggtaacagaggaccactttagcccagattctagctattccagttagagcaaagcatggtgttctggctctttactgttgtggaatattattttaagatgtgttacatctattttaatgatgcaaaggtgtgttgcattcttttatgttgcatttgtttaactctgtgaagctgtgttactttgcctgtctaaaacaccttattgatctaataaagagctgaatggccaatagcaaggcaagagaaaggataggcagggttgacttgcagagaaaataaataggagaaatctggggagaaaagatcaaggagcaagaagaggagtaggataccagcggccagtcacccagctatgcaacaagccacagagaaagaagtaaagaaaggtatacagaacagagaaaaataaaagcccagaggcaaaagacatatgagatcatttaagttaagaaaagctgactagaaacaaatcaagctaagaccaggcattcataagaaagagtaagactccacgtgtgatttatttgggggctgggtggtgggttccccaaagagcaaagagtaaaaaaaatccaactacaattttctcttgatattataagggaaaccaataaaatattttaagaacagacatagaggaaagcttgaggacaattttacaagcatttcaaaaaaaaaaaaaaaaaaaaaaaagcactccaaagcaagcaggctctgtaaatctcagcagctgcctgaagaaaggagctagaaaagaggaacagagaaagccaagccatgccatttgagttgagaaaggaagtcaactactacatggaaaataaggagtctcatggctcacggaaacacacacacacacacacacacacacacacacacacacacacacacacagagagagagagagagagagagagagagagagagagagagagagagagcagagagagcagatgagggatttggagaaggaataagaatgtccagagtaccagaaaaagtatacttaggctcttaccagtgactgaaagaaagacagaagaaaaaacagttatgcttttctgagtcaggactcagaaagatgggcagactcaacagaagtttgtggcagctctacagccatgcacaagagtcaggaattctggaaaggagaaatacattgtctcattaaaggaataattatttttttatctctttagtatgccttaagatggtcctaccttcctgaggaatagtcccttatcaggaaattgacctgcccaactcaaggtgttaggtctccacccaggccagagattgcatttctcttgaccagaaagaaagagtttgcccataattggtcttcactgcaacacagagagcagtgaatacatctcagccagccccccagttctccaggaggagaatgctcttagacgtgcaactgcttgactcaacaatggcagcatttcccaagtagacaaggcactatgtctattcatgtactgggagagagggatggctgttttgttctgtcaagactccatacccccagagtggggaatgttgtaactaacttgtaggaggcaaggctgtgtgtatgcaacctgggatccatttcctgtgacagcagagcagcaaagatcatgaaggtcctggttttactaacaccccctccaaaataaaatacagccacctaaataactgtgctctgtatgacttacaatatctatgtcctcttttacttgtttccatgaatatatttgattagtcattgtttaggttttttttttttcctttttggtaagaggaatgagttctaaaaacttcttgtcaacaatcttcctggagtcacttctttagaaattacttagaagccaggcagtggtggcacactcctttaatcccagcactcgggaggcagaggcaggtggatctctgttagttcagggccagcttggtctacaagagctagttccagaacagctagaactatacaaagaaaccctgtcttgaagaaacagagagagagagagagagagaaagagaaagagagagggggagagagagagagatgatttagtagtatatatgtttgtatttgtgtggggtatgttgtctgtatagattaatatctaatgtcatctgataaacccttgaagaacaaacataaatcctattttgtcttactaccacagcaacaacaaatatctgaagacccaagaggtatccaatcaaaggaagaaatgagtttattttaggatgtggagaagggtaaagtttggtaagctttaaatgtagtactgttcaactgacttacactaaaggatttaaaacaagcctggcatagaacaaatgtgtaatgttcaacttcattatcctttcagttctgagtcaaaggataccttactcacccctttatatttttacaaggaataaaacctaaatttcagtgtgttgttttgttcttgagtagatgtaatagaaagaataattaatgcttttaaaaatcttcatgcattacatttagatcagtgtgtctactatataattgattttcataggaatgtggaaaacctttctaagccatatttttgtgtcagtttgtgttctttctttaaataagatcagagtctgtgatagagttgtagtgttaatatttcagttggaaaaaacataaagcatagacactgtaagtgtgtgactcaatgatcacaaaataaacacatctatatgtctacttcccagactgaaaaataaaccagaagatgcctgatgttctgaagacatgattcctttttgctctttcctatattatcaaggatagagtctcagcctctcattcctgtgatgtttcatctaggtttgatgttttaataatagaatctgtactctgtaaatggaagattctgtcccaccttgttgggcaactgtttactcccaaataaacacacagaggcttatattaattacaaatcatttggctgatggcctagacttcttattagctagctctttcttaattattaacccatttttattactctgtttattttcatgtggtttaggcttaccagtgaggcctggatttcttgttttcttggcagctgcatggagtctctaccttgactcctctctgcattcctcctcctagtctggtatccccacctatacttcctgcctggctacattctgcctgtcctttggccaaaacagctttattcatcaaccaataagaaaaacatattcacagcatacagaaggacatcccccatcatctcctcttttctgtctaaataaaacagagggttttaactttaacttagtaaaattatatataacaaaacatttttcaagcaagaactatagttaacaatatttagttcactaacatttggcaaaattttaaaaaatattctatcatctatcctatctttgtgtctaaagattatatgtaacttatcttttatcataactaaccacaactatctgtcttcaactgcgtcaaagacctcagaaggataatatataaactctagaattgacagagacatctggccacctggagagacacaccaagtttctctgtaacgttggggcatccctctttaacccataggccatagtgtctggcagactttttaatgaagtaggaaatttgaagatctgttctgtcttgcattggcaaagtttgtcagttgctttcttctgtaaagcaggaaatctgaaggcccattctgtctcttggcaagtttagcagtcactttcctttgtaacctgctaatccagtttggacagcatgcttactgtcagcagttgaagcaaggacagttctttgcccaataggccagttttgccacattgaaggcaaactccataatgagtttcttctacgcccatcttactctctgacataattgatgttgccaggagcagttgtttctcattgttataaaaccctaataaatcatttttaaatgccatattctgtaggtctttgaaaggttttgaaaaatacctatccatttcaaaacatatctcggtatatctagaaaacctaacttcataattttttactattataggtgactacctataatctgtatttaattatacattacattttaaaatgaactgtataaacacaatatctaaacaagagtagcaatatacatataacaaaattgaccttaaatttgtatcaataaaccaaaaaccaaaccaatgtaaagtattcatttctatatcatattcccttttttctttagaaagagattgactatgatcattaaccatttataactaatcctgtttaaatgaaaacaaacatttataaacaatatttgggaatatgggcatagttctttccaaacttcctgctgcttggggatactgtcaatcccaaggggatcctaagaaaacccagaaccttggccaaatcctgcctgtagaagaggtctgtgaggctgcaatgtctcagctgttttggatgttggatcacgtgggccactgtttcagggggtcttgtttgattaaaccaaattaatctggaaggaatccacagtttttcatcttccatggaaacaaaagcaggacctcttttccaaagtaaaatgtccttagacttggcaagaatttccacataaaacctgaaaaaaaatctttaaaaaaataaataaataaaaaggttctcaacacacactccagaaatggagccacactgggcattgggcttcctagtctcagtctcatgcaggccatggcacagagatgctgtgacagtagggcttgagcacagcatagcagactcccactgctgtacacagaggccatctccaagcctcacagcatgctgcatggcagatttagctttgactcatacagacaaaaaaaggttcatgggcagtgttctacaagttgcttgctggcagcataggccaaagtcaaggtggtgagtacagctcccaaaactggtggtaagcatacccctgccaagttggaaagcctaactgggtggagccagcagccaaaacctcagctttaatcctagccttgcagtttagcagattaaagactcatgtggtcaaaaaaagatagagatatacactaaagacagattcagatggaaagaaaacctctaaacagtttacactgtgtttaaaaatatacgtagctcagttggtagagcatgagactcttaatattagggtcgtgggtttgtaccctacattggacaccacttgtaaatagaagtttctctcccactcattcctgtaggaaacactgtagccagcctacccaagctgcaatcaccctgcccaggtgcccaggccagcttgcctgagcatgcacagcaggcacttcctccctgagccaagctgccaagcctgcctcaacacccagagactgctgatggacctgacccagaaacaccaatgaggaaaggacaactcagcagagtcagccgcctgagccaataggaccttgggaggggtataaaggcaggtctaacttaatagatgagtctgcaatatgctctgctactcactgattcccagtgtctgagttattggtgcttcgtcttctcaccccctccccaaaggggtgtctgagcagggtaacccacaacacggtcccacaaccatttagtcccaaataaacacacagaggcttatattaattataaactgtttggccaatggctcagttcctattggctagctctttcttaattattaacccatttttattaatctgtgtgtctccatgtggtctacgcttagccagtgatgccgagatctcttgctttctcggcagctacatggtgtctctccctcgactcttccctgtgatcctcctcctagaattctcctaatctggtagcccacctatacttcctgcctggctgcatcctgcctgtacattggctgaaacaggtttattcatcaaccaataagagaaaaatattcacagcatacagaaggacatcctccatttttttatatcctttctttgttattgtattgcattcctggataacatacaactaagaaaaacaaaaccttaaggattgagatagatgcagtagtttgtacctaaaaccccagcatcatcagatatagatggtggaggattgtgagttcaaggccagtatggtctgtattgggagatcctatcttaaaaacttctcatggattacattaaatatatattatctgtctccagttatggggggattttagtaaaagaagaaaattatgttgagaggtttaaattttggcaactatgtttggttttgttgcacaagaaaataaaaaggagaaatttcctcatgaacatgggattgctacaggagaagctgatttcctaatgacctgttgcaattaaaatattcatatactcttcacatggataagagaacctggagggtggaagtcactttgaggtcttgactgactttcaggagtgttagatggggaatcaaagaaaaggcagttcccaaaaacaaattaccactttactctagatgtaacatttgatttcatttcatctttacaggctaataaaacttcacaagaactatattccttctgggaagagaacttcagctaagcctttcccatgcttccaaggaagactaaaaaaacccagacattaattagatagagaggaaacaggtaagacaaaaagacccaaattctaaaacaggttgtctagttcaggatgtcaaggtaccagattccagggtttcaaattctgggccttagcaataatgcaccctgcttggtaacttccagtttcaaattttctgttgtttgagaatttcttaatacacatctattttgaccaagtctactgtcctttgcccctcctccaattcttccataactcccccatcaccttttcctccaaacttcttacactctttccttttcaaacccactgaggctacctagtgccatctggatgtacatgggtgtagaacaatctcctggagcatggataggtagcctctcagagtcctcagccctgaagaaaagtgactctctctccttcaaagtcattagctgtcaatagctcctcagccagtggtgggacttctgaagcatctcccacttccatgctggaattttgcttggcttgatcttgtgtgggtcttattatgtagttgcaaccactgtgacttcatatatgcaacagccagatcacatcaggaaaatattttgtatgcattttcaggaagtagtgttgtctgtattgcctcagcagccatgaaatctagaaggaagctgcaaccatttcatcagcctccttcaagagacagacagggccaggcgttggtggcggatgcctttaatcccagcactcgggaggcagaggcaggcggttctctgtgagttcgaggccagcctggtctccagagcgagtgccaggataggctccaaagctacacagagaaaccctgtctcaaaagagagagagagagagagagagacagagagagagagagagagacagagagagagagagagagagagagagagagagagagagagagacagagaggttagcatgggcttgggatatggtactgcctaagagccccaaagaaacaaagggtacaaattgatgtaagttagtgctgaatactctcatcaaaccagtatcattttatcgttggctctgagtcatgtctgtttctaaagagcagctccatgattttcctagccacttctttaccctaggaccagcagtgcttagagaatacacctgacatattttttcaatgacctcctttatagtctcttctctcttcccatttccacttctatctctgtgtgtaatattacattttctaacagccatgagaatctgcagtctgtctcagggacagatgagtgtgtatgaactgatagaggatcttgatcactaacatttcttaagtagccaggaagaaaaatgaagtccagcaccttctgtggatttccaggatgtgaactccatcctggtctggactcaagcgggggggggggggaggatatccttttggaaccaaaatgatgaaaagtgtgtattctttattcattatgatatgaataaagagtgggcaggacctctggatagggtggatactactgtgcagtgactttgtatcagcaaacacaaatcatgggaatttttggaaagaatccaaaaagaatttgatacctttgttccctgctgtcaatgtaaagtgttacagtttctacataagagaggaaatggatcttatcctgtgactgtggaatagggtcagaagcagtgagactacagcacaatcaaccccaaggtgaaaatccctgtaagagcttaggccaagacccagttaagctgaaattagagtcttcgtctatggaaacagagatttttgaaacactttcttttagtctctggttgtagcattaattccagtgcaacaaaaacagatatcttcaaataaaggtccctactcaccccaccagggttgtaacaggttgttttgtatcaaaaggcagagagggacacagcaatacagaaataacatgagcaccacaccacccagatcctgaaaatggattcctagcagaggactatgaagaatggaagacacaggttccaaactcatgctacaaattgcctgagcagaagagaaaaggcgtagacctggggtctggaaacttggcacctcatacagttgaatctttggccaagataatataaaaaaggattattccgtgaatacagaatttttccaggttaagtaagaaggtgacagaaagcagtttagtcagcaattctattgctataaatcagtgtttctcctagtgctgtgaccctttaatacagtccctcatgttgtggtggcccccaaccataaacgtgtcttgttgccactttataattataattttgctactgttatgaatcataagtatctgacatcatgacccacagattgagaaacccctgctacaaaaataattagaaataggcctcgatatccttggggaggtagggtgggtggattggggtggctggtggggagcatgggaggatgggaggacaagggaatgggggattgatatgtaaaataagattgtttctaaagtaaaaaaaaaaagaaatatcaaggagaataattagattaccaagagctgtaaaggggctgcttcctgttaaacatgaactttaaaaacttcaataaatactacagaaacatggaattccatcagaaatttctagcctctccagggttaacgtcttcttctaattttagaagggataacagtatctgttggtatgtgttttgagattaatgaaaattgatacaaacatctgatgcagtgatttataaagagactgatctattgctgtgaacttcctctcacttggcctcaacttatctagaggaggagggggaatgagatatagacttggcatctaggtaatagactcttcactatttccatcacttgtgatttctctaaatgattctgctgttccataatgttgttagagccaatgctcctcagatttgtttctaccataaattcatgaatacaggaagcactgaccattaaaatgaattgctaggtcacacagtaattatacagctatcttaacatgagacaacccagaagaattaaggactcttctgatagattaaaccagtagaaaagttgtatttggcattaccatcttgtgaataaaagtggctgtttcttgctgtagattcttcctgtagcttattcctttctgcaacaaacttggaatttacttcccacagtttagcactatctgatcatttactgggaacactttcctcccatgcagctagagtttactgattacattcctgagctaagtgtgagacctgggtccttgttcccctttcctatgtaattgcagagatctgcattccttcaattatccttattggcaggcatttggtcaaagtttagggcccaggcaaaagcatcccatctaagactttcccaaatatccaaggtcatagaattactacacacccaaagttgttaattcatagctgcctagatggattaaaaaaaaaaaaaaagcatgcccaggtttttcctcactggcagatagagaagcaataacctaaactaaccctgcactagaagattctcaaacttcttgtattaactcaagattttagctcagagatttattcctccctcctgtttcccctgagaagataaagacaaagataatcagcccatttgttcatcctctgggaaaagcaaactttcctgaaggcctgtgccaccactgaggccaggtgccaggttctgtttcttgtgcagattaaacttggaccctctccttgaccacagccctaagcaatcggtgctaaaattttctcctagcagtttttattgctctgtgtgtaaatcttatctgtcttgatgaccctaaaaactcaagcttcacattctattgcaaaaagatgagaagaataaaggaacatgcagaggagccattgtgtgtgagtcaattccttttttcccctcagattttagttccttcacttatttatagttccttttttttgaaccctgagtgaaaattttaaaagcaggccttttaaagtttcagataatgaatatgcttgtggaacatttatctgatatcagattctactgcagtccaggaagtcaaatgaaaagtctcatgctgaagacactttcaaagatcccctatcagaacagaggtcaacagagcgggtgatgttccatcctcaactgccttgagtgtgaacaagaataggagtcagttgggtattcatccacattctcgggaatgcctctgtctatcactttaagcttcccaccctttttccaatcacatatttctcttgttattgctatttatttatttacccagggagagtgtctctcccctaagtattcttacttctacatccccctaatgtgtttctacctttgctctgtctcatctctaatctctttcaaaaatgggatcctgtttcttcccaggttgaattcttcagatggcatgctggcctaagaggtaaactccaaatgtagtgtgaatttgaaagcttttacactaaagctgtgaagccctggctatctcttacctattatggtcaactctcggtgctgatccaaaacttttctagatatcgttcactgtattattctaaattgccatccataaaccgaattacttgtatactatgtgaatcatccgtgtattgtaaccagttagtgtgcctattgttcatgcattgtgcatattgcttattcattatgctatattatttgtctctactgtgcattactttctacacattctcttctcatcatgaaagtatggaagaatttctataaaaattaaatcttagtctctatatggtggttcatggttgtaacctcagcacttgggataatgaagaaggggtattgagagttcacctggagtacatattccagactagcaaatcccagaccagcatggactacataatgagacacacccctgggcaggtaaataaataaataagcagcaataacaatatatcaacagacccctaaagctagaatttctcatgaaattgtcataaatactagaactgaccatgaaagtgcaaatggtttggtgtgcatgtgccacaaggtgaagcttgactattatctgtggagatgctgcagggtaggtaaaaacattggtagaaaaggcatgataatcagaaagcaggtttttcaagcagagaacactcaaacttggtctttctccaggaaaaattacaaggtctgagcttgtccacttcgttgattctttgtgtattggcataaatgttaagttttaaacatcatcttcctaagtactaagttataataaattatttcattggaaactcaaaaattcattttgatatgattggaatccatattttgatttatctgtcaataaaaattatgtcactccaatacttggtgtcatggaccatcatggacccccttaagcttcagaatttgtctaactgcacttgacattgattctgcagagttcgctgcatcttcaccaagcttctcttagcaactaccttaaaacagtatgtttcaatatccatgccagccctcagctataagccaattgtttaactataattataaagatggttccttctaggtaaaaactcaaagtttctctctgagagagagaggtatacagattagatagatgatatatatgtagatagatagatagatagatagatagatagatagatagatagatcgatagatagatagatcctataccctggaggatgtgcatttgaatttgactaagtccttctttggctgccaacataagataaaagaaagcaacactcaccagaactcttgttccagttgaaattaacaaagatcatcaatcaacaaactaataacaagaggaccactccacatagagggatatactctccagcctagacacacaggggagggtctaggccctgctccaaatgatatgacagtctttgaagatcccccatagaaggcttctccccaccccaccccacccccgggagcagaaaggggttgggacagggggtcggtggggggcaggggaggagaggagaggagggagagggacctgggattgacatgtaaaagaatcttgtttctaatttaaggaaaaaataattgtaaaaaaaaaaacaagaggaaaaattattattggaaattaaaatttacaaaaatatcactcttgtaaagtgttgagtagaccagttgtcttaacagaagcactacatttacagatggatgattgaactcccaggaagagtggtgcagttccacatactggatctattgaaaattaccaaggttttcccaagaagagggctattcaaattgtttaagagcactgaaagataaggcttccagattcctgaaatgaagtaatgctaatgtggcaccaaaaccgaataatatattttaaaaataaaactaagaagtattctcatttacaatactgctactaaatgatgtaaataagacccatctcaaagaaaacaagtaattccacactgaaggatgactggaaaaatcctagttcatttcattttttttcttcagtaattctatgaatagccataatgtctagaatcactctggtaggattttatactttacactactaatcatttgaattcttgtgtttgtatgctaagcttgattttagaaggtttaaagatgataacctaatactcaaatggctttaatgaaacagcttagttactaccatcttcctcagcacatttctaagtaagcaatgaaagtaattcttgtgaatgaattcaacaatctcagggggaaaataacagaaagtaaaaccgtccatctttctatctgaaataaatcaagaagatgtggactttttctttatttaaatggccctgagtttagacctgagtatccctctaagaccctgtgttacaggtctagcacccactgtggtgttgttgggcaggtgtgaaatcttaagaaagtggttttagtgagatgtctgagaccattggtagcatgccttcaaaattagagcagcaactagcacccttctccttctgtatgacctaccaaccgcaaagttaacggtttttttcaccatggctctttgccatgaggtgctgtcagaggaccttcccacccacactgggaacatttcattatggactgatgggcgtttaaggaaaaaagaaacactttacttttcattttgttagtctttcagaatttcatacaatgtattccccaccccacccccagatccacccgtcttctctacccacccatctttgtgtttttgttcttatagctgtagtttcaccacttcaagtctcaacccttatcagagaagcttccttttgcagtagacggtgattgacacagagccccacaactcatcagtgtgcaaaggataagggactgaagacttccaagctctaaattggggtatctgtaaaacacatccttctcccaagattcagggatcactataagagaggaagcaaaaaattgaaagagttgaaagaagcaaaacttctctcttcacaagttatcatggttgttttccatgctgatgaaagctggcaaatgtaaacatacaaatacttataatggggaaatatgattgaaatttataaaactcagggtgggatttgagaggtttgctcagtagttaagaggatcagaattcagttcccaataaccatgtcagtagactcatatctgaccttttctggcttctacagacatgcacatgtacatatacaaacacacaccaacgcatatattaaaaataataaaatgaattgttaaaaaattaaggaaaaagttctatgcaacttgatatacttatttacaatgctagttaaagcctcactattattcaaaattattgttcatttaaacatagatgaagaattatattaattatattaattatattaatcatgctgtgtgggcatgtattgatctgaaaccctttatcataagtaaacacttaaagggaaatagttgaaattaaaattaaaatcagtataaaaatggagatatcccatgatactattctgccaacattaaggaaatgcttttaattaaatgtttgaaattacttttatttaaatatgagtgaaacttttaaagccattagaaaccgaacaagaaaaccagtaagaaacattttgtagagaaattatggaaatatttaatttgctaatgtgcatgtgactttcaaagaattgaatagagacactcttgatcatattagcaaaatgtatatcaagcatctcagaggactatcattaagaaagaatgtgaaagatacataataaaaatatatgaagtacctaaagtaaacacaggaaaccagaaaaaaaaaaaaaaacctcttgtggagacatttttcgggtttcgtataaggtggaaacttcgtaagtcaaagctaactggcataaacaactagtgcagctgtactacatcaaagagaaaagggtaacactttacagataaggcttgaaaacaaagtggaaacgtgattaaaggaactgctaacatatttctcagaattgaacaaaggctcatttgggtggcacccacctttcagagcctgtggcaccatggttgacactctgcattccaaagaatgttcaacgtaggtagctgtggtgaactatgtagaaaccctattctgtggtcagaaaggggaaacgaaactgagatcagaaaaaatgaagtggttaggctagtgaatgccctgttgtggagacagattggttcctggatcctgtattttacactttgagcccccagattcgtcacagtgatggtagcttgcagcgattgtttgagatggaattgcacaataaaatgcccggagcacagcacacactgggtaaaaagctgtttagtattttagcattagtattggtagatgcatagttatataccacttcccaaagtaggtcccatctgtattcttcaaacagaatctcttgctgcaaatgtggggcaaatcaaactaaaactctaaacattttccttctccatctacagataaatagaacccgccatccttgagagatttctctgattccaacctacccatttactccttgttggtgaagcctgatagtttaaactgttacattctgagtttgtgagaatgcccgtatatgattttcttatcagggttagaattttacccattaaaaaaaaaatcagctcacaatgtttaatttacttctagagttttttttaattaaacttatataattaatttaactactagcaattccttttcctttgtgtgtgagatgtttgtgtgtatgtgtgtgtgtgaaatgtgtgtgtgtgtgtgttcgtgagtgtaatttgcacaggtacacactacagcacgtgtgtgtggtcctcagcctgttccatgctgcagatgtctgaatagctgaaccatgagtcttcagggcttatgcctccacttcccatctcaaggcaagagcacagagattacagaagtcctatgtccatttttacttaggttctggagatccaaattcaggtcctcaaactttcccagcatgtgatttgcccacagatttgacaacttagatggaatatctttttttaatttttaaatttatttatttatttatttatttatttatttatttatttatttatttttgaggccttggactaatttatttactatcaagttgggtagagagttcttttttatctccgttttttatttgaattagaaacaagattgctttacatgtcaatcccagttccctctccctcccctcctccctaccaactaaaaccctacctatcacatactctttctgctccccagggagggtgaggccttccatagggggtctttagagtctgtcatatcctttggaatagggcctaggcccacctccctgtgtgtcttggctcaggccctctatgtggaatgggctcctatgttaggaataagtactgatctactacaggaggccccatagatttctgaggtctcctcactgacatccacattctggggtctggatcagtcccatgctggtttcctagctatcagtctggggagccagaggtcagctgtttcaagatatttcatctagaaggggaaaggggcaagatctcctagataaaataccttaaatctcagaaagaaaagtagccttgagtgctatggaatgctatgctctgggcacatactaaattacagaatttatagttacctgcatgggacttgcacaagatccatcaggctaaaatttccagcatacagtagaaaggggatcctgaggcccccatccctagctgaggaggtgttggctgttcatgactgttgggggaagagcagtaatttttctttagtgggtgtccactggtagtttttcatgcctcagtagatgactctatacccttatgcatacaggcaggctattgccatattttttggctacttttcaaatttgacagtaagaccctattgctgaagacaacacactagaattaaaaacatgaccaagtccaactgctaatgaccggaaagcttcattcctggtggctagctttcatagtgccagaaggtgttatgtctaaattataaacagtagattaaagaaaaaaagcatgaagttgagagggagatgtgtgttggggagagcctggggctgaggtagaaggatggagtgaagagcggataccatcaaatgcatttaggattagagagatgattcggtggttaagggcacttgctgctcttacagaggaccagaattctgtttctagcagccatgccataagaacattaaagaaaggaaaggaaacagaggtaaataagagacaaaactgagaaaattcccttatctttactaagagtacagaatgggatggaggtggaaggaaccaaaatcattccttgaattagagattgtagctgtatctgtcattgtcacatttagcttgataataactgtgataaatgttcactcattcatgagtgttcttacaagcacctctcaacatgagtaatacctttaaaactgagtttcaatgaactgaattaatatacctgtaacatattccccaaacatgagaatgccactggccagagccaaggctgcatgtcttaatgccccgcacgaaaacctcccagagtaccaaggttagctaagaattcagaacacacattcttgtccaccacctccctcctgtggcccaattaaatacaccacttaatgtcaggtataaggaaaggaagcagcaaacaaaaataaagccaggcacagtggattgattatagacactcattgtcttcctagcacacaagtcattttctttcctcggatcataatttatcatattttagggtaagaaagaatatataaagatctctaactcccccttctccttctggccactgttctatatttatagcatttggttcacatctctcagatacaacctagtcccagtgcctctttgttataaagtgtgtgtgtgcgtgtgtgtgtgtgtgtgtgaaacaacttctcagtgagcttcctcatgactttagatttgcatctaaaggaaaaggagaagatctatgcaatgctaagttcatcagtgcgtcatttgtccatagaagggcaaccaagggcccttgaggacaattcctctcctcagaaaatgctcattgtttttgtctttgcagttttttttttatttgaattagaaacaagattgttttacatgacaatcccagttcccttctccctccagtcctcccctaccatcctcccccaactaaatccctacctatcgcatatcctttctgctccccctggatggtgaggccttccataggatgtcatcagaatctatcatttcctttgggatagggcctaggcccaccccccatgagaaaatgctcttaaaaggaaaaaaaaaatagaggctccaatacttgatcctaggttttctggctctacactcaggtgcatgtgtctcattccagattgaaatacacacacacacacacacacacacacacacacacacacacacacacacacatattctgttgggtctgttcctcctctagaaagccctgactaatacagtgtaaatcataaatgctctgccatatagactgatgtagcaataattattctatggaatgagaaggattaatgaataacacaaggaaatatttggttaatggcaataaagctgattatcatttgtaagcttataggaaatcgacttgaaagaaactaacatagaactgcatgtttttacattttaaaacagtgtcattgctaactgtattctaaatacgtactcttaatgcccacggttaagtgtagccctcagccctcatcagagaagcttcttgcagtacctggagactattacagaaaaccacaattggtcaaaatggagtgaacaactggctataggttgttccaagagttccaaacacaaattgatatatctataaccgagtccctgtactgaaggcttgggggaacactatggaagaggggacggaaagatggaaagagccagaggaccaaaatactttctgctagatagagtcttctaaacatgactggaaaagtgtacccatgaaatttcaatggtctgagtgcctgaacaaggctaacaagacactactagttgaaatacctacgtggatagggggaatttcacaagaccccacccatagataaaggctacaggctatcaatggctgctgagagagattcggtcttttccaaggacacgctccaatcctaatgtatcaaccctcaacacatatacatatgtgcacgctcaatagactagtacggtgtgtgtgtgtgtgtgtgtgtgtgtgtgtgtgtgtgtgtgtgtgttaatattaattaaagaagaggtcatgaattaagagagaatgggagaacataggagaaatttgggggaaggaagttagaaatgagataaatattgtactcttatataaaatcctttaaaattaaattttaaataaaaaaaccccagaattttcaaggtatctcaaaggagggggggcttagagtaattcttcttgaaagaatgccaaaaggttgagccagcatgagtttcatgaaacaatattttagaaagaaaggttaagagtcatggcaaacagttaaaggtctaaagaaaaccaggacatttttcaacagtattgcccagaaaagaagaaagcatgagacagggtctgtgactcaagattgacagtagaccttgaagagtattagttctctggggaagcccactaatgctcacaccatggtccccacaaaaacaactttttatcaatttacccttcgaaagtcaccatcagactctgaccaggttagcaggcaggctaattgccttctgtcctctaaatctaatactctcactcccgccttgccgctccagctctgtaggagaccacccgctggctccagttctgtagcagaccacccgctggctccagctctgtagcagaccacctgctgccggttccccttcctctctgctgcacacccagtggatcacagggatctcccactcactgctttaatccagtcccaactccagcaggcattctcagggatagcaggccactgcagccaaagaagcagtctccctcctgccgccaaatccattctcccagccccatccccagctctataggggccccttgcttcagtctctcctgaacacacacataccctccccgacactcagtgaatcacacagatcttcccctccaaaccctccccccccacacacacacactccttgctttatcccagtttccaactccaactgatttccctaggaactgaaaaaccactggggccagggaagcagataggttaaattgcacgtcctcacttctcctccaaccctccaaacccaatctcctaatgtcgctcccagcctatagcagaccacctaagcagtctcctctgctccccttccccagctctggtcatcacacagatcttctccttcaatctttctttcccccaactcatcactttttcccaggccccaattccaggaggcaccacaggagatggtcagccaaacgtgctagagaagcaaataggccaacaaaagcaggtaggcaggcttcagatcttcactctccatcctctcctccaaatctaatgccccaatctcctcaccagctctttagcagaccgcctgctgtggcctcttctcactctctgaccccattcccagggaactaagcagacctgtcagaacaccctgctgtccttcatccagtagattcccagctcctagcccaccctcattcctcagtgtcagctcctaatacataaactcattgtacccagaacatccagttctggaacagtaccagtactggtactgatgaagatgccagaagaattccctggcaggaaacacacagccaccacaccctcctaagaacaagagagggcaacagaaaacaagaaacaaaacatccatccaataaagacaagaccagatatcagcacctcgaattacaatcttctcaaactccgatacctagatggcagcataaaaacacaatcaataaccaccaggacaatatgtcttcactaggaacaagcaaccctaccacagtgggcctgagaaatgcaacatagctgaagcacaagacaaagacctttaaatagcctttatgagccaggtatgctttaatcacaacagaggcaggcagatctacagagcaaggtccaggacaggctctaaagctatacagagaaactccgtaaaaagaaaacaaaaaagctttatgaatgtgatagagtcttcaaagaagaaataaatcccttatagacatctatggacacaaaaaacagtgcaaggaaaggaaatgaacaaaacagttcaaggcctaaaagtagaaataaaaacaataaggaaatccaaattaagggaaatctggaaatttaggaactcaaataggaaccacaaaggcaaatttaccaacagaatacaagagatggaagagtgaatctgaggcactgaagacacaacacaagaaatggagacctcagccaaggaagatgttaaagtaaaacaacacacacacacacacacacacacacacacacacacacacacacaccatcctggaaaacagggatactatgaaaagaccaacagaccaaatataagaatattgaaatagaagaaggagaagaaagccaggccaaaagcccagaagacattttcagcataatcatagaaaaaaatttccctaaactaaagtacttgcctataaagatacaagaagcttatataacaccaaatagactggaccagaaaagaaagtcccctcaccacataatattcaaaatactcatacagaacaaagaaaaaatattaaaagctgcaagggaaaaagaccaagtaacatacaaaggcagacctacatgtaacttctcaatggggacactgtaagcacacaaaccccccattcccaacccagaaagaatttccaaatgataaccacctgcttttgaaagtttagttttctccaagggagtctcattgggtggacaaagtaagcttcaggatatactgcatgcccagcagtagataggaaacagaaaacaaactgggtggcatttttggaggttccttgtctcataacattgggcaaggacttttcctttttgaaaattccctcttgttttttattttatttgtgcatttattttcttctctccttttaccccacaggtcctttgtgtatgtattatgacttccagtgtgatgctcttatgtcattcatgaatgagtgaacaagtagctctctgtttctatatctgttccttgtgctttttcttgggctcttttccttctgtttgttttgccccgttctgatgtgtttggtttttatcgtatcttctatttcattattatccctcagaagcctgtttgttttctaatgagagacagaaaggggttgacattagatggcaaaggagataggaactgggaggagtagaggagtaggaggagggaaaccataaacaggatatattatgtgagaaaaaaatctttcaatacaaggaaaagaagaagaaaaagaaaaccaagccaaggtcccagggctaggctactctcagctcagggacacctcttcatttgctttccctgtatggcaaagagccacaaatgctctgtccccataggctcagctttctctcctcttcctcctaagtacactaactgccctgcactgctactcttctgtgaaagttactctcaacagtgtcagaagcaggtcagtggtcttcggtctcctagaagtggcttctgccagacctgctttccctctgcatcttttagccgggcattggtggggcacgcctttagtcccagcactccggaggcagaggcaggtggatctctgtgaattcgaggccagcctggtctccagagcaagtgccaggataggctccaaagctatacagagaaaccctgtctcagaaaaacaaaacaaacaaacaaaaaaaacaaaaaacaaaacaaaaaaaacaacaacaaaaaaaaacattccacctctccctttgctccccatgtcatttttactgattcttcctccaatccctgagtttttcatatctggggatcctggagcttaattcctagttgcctctgattcctgcctcacaggttctagtgtcccatgtgggtactgacagattccatggatttctcctgtccagatatttcttgtgagtttctccttagtgcacatttgctgacacttggaagtctagtgtttcctgtgttcacaacaaaacacctgctctggactgcaggcttaatccagccatgactctgtgcgtgtgcgtgtgtgtgtgtgtgtgtgtgtgtgtgtgtgtgtgtgtgtgtgtgtgtgtgtgtgtgtgcgcgcatacatgcactcgtgtttcacaagtgtggggatgtcagaggacaacctcaggtgttattcctcagacaccatccaccttgtttgagacagagtctgtggggattcattgtttatgatttaataaagcccctggagatgaaaatgcaaagctagccacagccatagagccaggcaatggtgactaacacctttagttccaccagccacactaattagctatagacgttggacagtgttggtgcacacctttaatcccaagactcaggagacaaaggcagatggatctctgtgagttcaatgccacccagggttccattagcatgaatcagtctaaaagaagcagctcacacaaaggggatctcagcacttgtcattccatgcctttaatcccagccctagagaggtatataagataggagtgggacattcagtagtcagtctcagagatttattctccagccatgctgaggacaggacagccctttcagcctgaggaagaggtaagagttagtggctggctgctttgcttttttgattttcagcttgaattccaatatctgtctctgggttttaattattcatgctacaaaagtctcagtgttctggagtatgctaggccggctgaccctgagtccagggacctggccctctctgcctccacagcactgagattgcaagtgtgtgccaccattcattcatggctctttttttcccccttggctgacctagaacttattgtgcagacctcaggctggcctcagattctaagagtgccaggattgaagaaggtatgtgtacatctgtcattatttgtatttgttttttaacatgtgctcctggaatgagacatatactctcaaggcaatctatttttttcaattagagtcactgatggtactggacatttattgactatataaatattcaataatagaccacagtccataccaaataagcaacagcatacaaggattaaggaagtaactattaataaaggagaaaataggagcagaggatgggcagtggttaaaaacacttgttcttgcagagagccagatttccattcccagcaccagcatcagtagcacataactgcttgtaaatctaacccggaagaatgtgactcgctcttctgcctctgggcatccacactcacatggcatgctcacatttacacataaattaaaactaaattaagttatttaattattttctactattcccgaaagaataaaaccctggtgttgtggttttctgggtctgggtcttcaggacatgtttttgacagagaatctctggatatgtaactctggtgtcccacttcgtcatccagcattccccaattgccctgagaatcccccatccctgaaggcaagacaccaatgccctgctgggaacctgcagcacagctgtaatcgccatcactgaatgaacacaaatagcacacagctgggcttgggtttcaccactggccccaaactgaccacacatgtgacagatgacatcacatcttctcctttggaacttggactccagcctcttcctgctgatctttcaatgggcttgttattgcatgccttgtctagcttcctcaacatattgtctgttcccccttcaggcccacttagagcctttctcggtgacatcctttctggcattttaagatataccattcatttatcttatatttactatcattttctttcaaattaacagatttgcactggagaaacatgatgtccactgcctaagccatgtgattaaagtcaatgtcaatagtgatatttattgtatccacactgagaagataagcacaatgtccaaccttacagatcagggtcatgcagccctctctcccagaagtcactcaattctatcacccacatgtatgaagctttatcctgggtaactttcttagctgttcagtgccttcctctgtgtctacaggatgcagacagcttgatggaagttctccaaggaatagaatgaagaaagcaaacacaaagctctatacagcacaggaaaattcatatctgttcccctctcctatcaccacacatagatacaatcaacatcctcaaaatcactcacacaactttctcatatactcttacatcaaacaagaacagtaatacatggtgcaaacatgtgccctaattatttataactttggtaatgtgacattttatctgtctgttttgtgtgcaacttgtactcatggtgtatgcacatgcacgcgcacacgcacgcacgcacgcacacacacacacacacacacacagagagagagagagagagagagagagagagagagaatgccaccccatatgagtgctcagggaaacaccctgaagcttgggactttatatgcttttttgcaaccttcatggattgctgtagtctttacagcaattacccagcagagggtagcaaagctccttggtctcaaaaagccatttctactttattcatacaatgaaataggaaaattagaggtctgagtgtccattcagagaagataggacatgggcaggagactgttcagttttatctgaggtccaaggacaatagacaacagagacttgtgctaacaccaggcctgggtgaggaaggggtggagtctgctcctgggataattagaacccagaacattattttttccccctgagagatctgttattacctgtattgttaagaatcatctacatatgaatgttaaaaggcaggtagcttgttttaaatgttctgcctacagtgctgacccttacttctgtaactagaagggccaattctacatttcttgttattagtaggcagggagatagcaatttacaaaaggaaacaccatgcacccaaggggaaaacacaaaataagtaaccaaaataattatttttttctttttccacctataaacaaagtttaatgattaagacactgttgtgagatatttgattacacttcgaaataatatgtcactgccaatggtctaataaaaaagctaaacggcctaagaaagctttaaaaggaaagttccaaacacacaaacaagaatccagacatagtttcctagtcccacagtctctggtgggtcacagtatacagagacgtggctcctggctgctgcctgcaggctagggccagccagcagcaccttgtatcctgtcagcaccttgcactaggctgagccatgtggtggctgacgtgacaatttaagatgtgtaccttgttgtcagagaatgctgcaggtacttagtaaaaccaggtccagacacagaaaatttctaaaaaggtgcagtatgttttaaaatgtgctaagatgctgaaaaagaaaacaaaatgggtatagacagttgtataaaaatatagtttaaaaataataaagtctttaaagagagagtgaaagtaattttttaaaagccatgtaaagataggaaatacacaggacatttggatcctgtatggtgctttgtttacttttaattttttgaatgttaatgaacaaagaatggcagttgctgaaagacattggattgtggaagggactgctgaattaaaccagcctatgtactttagggatgtcttggcttcaaaatagaagctgggcaatgtgttgtgttgggggagaggttatgctcttgtttccacagaaaacaagttgtgtattccttcaaagttaatcaacatcagatttgactggggaagagctcctgaggatcttggctacagacatgaggggtaaaagccaagaaagtctacaagacagatggtgtataagctgatccctcaacatgggaacagctctgagacaggatgagacatgataaatgttaactacagggtcctcatgacttactattacatggcatccttccatatggatgaatagagatttatattgcagtgtggttatccaaacaggcttataaagttgacagatgtcttttacctgctcaaacataaaacaaaaattatctttagcttacttgtggcacactgaacattccatacttgtgttaatacagatatatatgttccctttaaaaacttatgtgttttcagagaaaaagaaccagacaccaattaagacaagtagcccaggtgatacagccttttggaatgcttctgttgcagtttcctcaaaattctgcatctagaacaacttcaaagctactagctgagatggtccagcctcacagactatccagccaagacttcagataagccctacactttcccatcacacaggtagtaaacaaaaattaatacagctagttctcccaggacttgaccattatcccaagttcctcagggtcctctaaagatgctgttgcccctcgacaacaggaaccattttaaagaacatgacacccacattcccaagaggtggggtgggtgggttttagtcattcagaaggttatagatgcttatcatcattctcactcaatacacagctgatgagattgtcacattggctaatttttaagaaattatttatttgcattttatatgtattggtattttggctgtatgtatatctgtgtgagggtatcggatcacctggcacaggagttacagataattgtgaactgtatgtgggtgctggaagctcaacccaggtcctcggaagagcagctagtggtcttaaccattgagccatctctccagcccttggataaattaaaaaaaaaaacattttattgattttatgttttagctttttgttgttttgtaattaactccttcttaaaacatttaattatttttagtcgtgtgtgtgtgtgtgtgtgtgtgtgtgtgtgtgtgtgtgtgtgtaattatttgcacattgagttcagatgcccttggaagttggaggagccaatctctttggaactggagttacaggtagttgtgagacacgggatataagtgctgagaactgaacttgggtcctttgcaattgcagtagtcagtcttaactattgattcctctcttttccaggcccttgccagcatagttttttgcttgctttggttttgatttttgtttgttttttgtttgttttgattctggtttttctttttaatttttataattgtaattagaccaaattaaattagaaacaagtttcttttacatgtcaatcccagttccctctccctcttctcctgccctgttctcccaccccttatcccaacccctttctgctccccagggagagtgaggccttccatgggggaatcttcagcgtctgtcatagcatttggagcagggcctagaccctccacagtgtgcctaggctgagagagtgtccctctatgtggagtggactcccaaatccattcatgtactatggttaaatagtgatctactaccagaggccccatagattgcccaaaccaccaaactgatatcctcattcagggggtctggaacattcctatgttggtttcccagctatcagtctggggtccatgagcaaccccttggtcaggtaagctatttctgtgggtttctccagcctggtcttgacccctttgctcatcactccttcctctctgcaactggattccagagttcatctcagtgtttaagctgtggggtttctgcttctgcttccatcagggtggcatataaggtagtcatcaatctcattatcagagaagggcatttaaggtagatgggattgggggaatagggatttgggggtaatggaggaggaaggactgggaggggagaagcggcgtttaaggtagcctctccactgttgtttagagattgttagctggtgtcatctttgtagatctcaagacatttccctactgcctgatttctctgtaaacctaaaatgtctccctctattatggtatttccattcttgttatcttctattcttcccctgactcaaccttttggctccctcatgtcctccgcatccctcctcttctccccttctcattctcctagctccctccccccccttcccgtgctctcaattttctcaggagatcttcacccattcccccactctaggggaccatgtatgtctcccttagggtcctccttgtttactagcttctctggcagtgtggattataggttgataatcctttactctatgtctaaaatccatatatgagtgagtacataccatgtttgtctttttgtgattgggttacctcgctcagaatggtttcttctagttccatccattttcttgcaaatttcaagattccattgtttttttttccactgagtagtactccattgtgtaaatataccacatgttctctatccattcttcagttgaggggcatctaggctgcttccagtttctggctattacaaatagtactgctatgaacatcgttgaaccaatgtctttgttgtatgaatgtgcttcttttgggtatatgcctaagagtggaattgctggatcttgtggtagactgatttccattttctagaggagtcgccatactgatttctaaagtggctgtacaagttggcactcccaccagcaatggagaaatgttctcctttctccacattctctccagcataaactgtcattggtgttttttattttggccattttgacaggagtaagatggtatctcagagttgttttgatttgcatttccctgatggctaaggatgttgaacactttcttatgtgtcttttggccattttagattcctcttttgagaattgtctatttagttctgtaccccactttttaattggattgtttggtgttttggagacaggcttcttagttctttgtgtattttggagatcagctctctgtcagatgtggggttggttttcccattctgtgggctagcattttgtcttgctgactgtgtcctttgccttacagaagcttctcagtttcaggagatcccatttatcaattgttgatctcagtgtccatgctactggtgtaatgtacaggaagcagtctcctgtaccaattaattcaagggtatttcccactttgtcttctaataggttcagtgtggctgtatttacattgaggtctttgatcaattttgactaaagttttgtgcatagcaatagacttggatccatctgcagtcttctacatgtccgcattcagttatgccagcaccatttgttgaagatgttctctttattccatcatataaatttggattgtttgtcaaaaatcaggtgttcataggtgtgtgggttaatatcagggttttcaactctattccattggtctaccagtcaatttttgtgccaataccaagctattttcaggactatagctctataatagagcttgaagtcagggatggtgatgccctgagaagttcctttattgtacagggttgttttagctatcttgggtcttttgtttctccatataatgttgagaattgtgcttacaaggtctatgaagaattgtattgggattttgatggggtgttggattttgttaaaggctttttcgtcatctagtgagataaccatgtgttttttttttctcctcagtctgtttatatgatgggttacattgatggattttcatatgttgaaccatccttgcacccctatgatgaagcctacttgatcatggtggatgatttctctgatgtgttcttagattcgatttaccagtattttattgagtatttttatatcagtgttcatgagggatattcgtctgtagttctctttcttagttttgtctttgtgtggcttgggtattaaggttattgaagcctcgtaaaaagagtttggcaatgacccttctgcttctattgtgtggaacaatttgaggagtactggtattagctcttgtttgaatttctggtagaattctgcacagaagccatctggccctgggctttttttggttgggagacttctgatgactgcttctatttcattaggggctataggtctatttaagttgcttatcagttcttgatttaattttggtaagtgaaatctgtccagaaaattgtccatttcctttaggttttcgaattttgaggaatataggtttttgaagtatgacttgatgattccctggatttcctctgtgtctgatgttatgtcccccttttcattcctgattttatcgatttacatgtttactctctgctgtttggtaagtttggataaaggtttgcctatcttgttgattttctcaaagcaccaactcttcattgtattgattctttgtattgttctcctagtttccattttattgatttcagccctcaatttgatcatttcctggcatctgctcctccggggtgtattgacttcttgtgttctaaagctaccaactttcctcttagcactgttttcaaagtgtcccataagattgggtatgttgtgtccgcattctcattgaattctaggaaatctttaatttatttttttatttcttcctcgacccaggaatggtgtcattgggtgttacttaatttccatgagtttgtagtttttctgcaatttgtgctgttgttgaattcgaactttaaagcatggtggtctgataaggtgcagaaggtttttttgtacctgttgaggtttgctatgtatttgaatggaatgttctatagacatctgttaagtccaattgggccataacttctattagttcctttgtttctttgttaagtttctgtctggtgttcctgtccagtggtgagagtggggtgttgaagtctcccactataagtgtgtgcagttttatgtgtgatttgagttttagtaatgttttacaaacatggatgcctttgtatttggggcataaatgttcagaattgagacttcatcctaatgcatttctcctgtgatgagtaggaagtgacctccttcatctcttttgattgattttaggttaaagtctaatttgttgcttattaggattgctacgcctgctttttttattgggttcatttggtttgaaaatttttttcccaacctttaattcttaggtaccatctgtctttgaaattgaggtgtgtttcttatatgcaacagaaggatggattctgtcttcttatccattctgctaatctgtgtcttttgataggcaagttaagaccattaatgttgagggatattaatgaccattgattgttcattcttgtttcttttggatttggtagtggtggcgaaattatgtgtgggattctatcccttttccttttggctattggtaaaatgggattatctattgcctatatttttctggttgtagttaacttccttgggttgcagttttctttccagaactttctggattggtggatatgtattgcttaaatctggttttgtcatggaatatcttgtttttttcttctatattaattgaaaactttgctgggtataatagtctgggctggcatccgtggtgtcttagggtaggtagaatatctttccaggaccttctggctttcagagtttccatggaaaagtcaggtgtaattctgataggtttgcttttatatgttacttgacctttttcctttgctgctcttaatattttctcttttttctgtatgttggggcttttgattatgtgttgaggagaccttttatttggttcattctatttggtgttctataggcttcttgtactttcattggcatgtctttctttagtttgggaaagttttcttctatgattttgttgaatatgttttctgtgcccttgagtttgatttcttcaccttctttgatacctattattcttgggtttggtcttttcacggtatcctatatttcctggatattttgtgttagggatttgttggactaagattttctttggttgatgagtctatttctcctagtgtaggggacagtaagccacgcctgttagagactggctacaggtgtgcctgaccacgcctgtcaaggtgtgttcaaggtgaagtcaggatgatgcggcatgggctcttaaggggctgcagagcacatggaagccccttctccctggccttgctcctcagctgctcttggcatgctctggcttgcttttggcttgtatttatctcaataaagatatcttgaccgtatgatctatggatggtctcttgcagtcatgcaatatactagtgtatcttcagctcctgagattctctcttccatctcttgtattctgttggttatgcttgcatctgtagtttctgatcatttacccagcttttctatttccagcattccctcagattgtgctttctttattgtctctatttcagtttttaggtcttgaagtgtttccttgagagatttgttgatatcttgtattttttggtttgttttttcttccatttctttatggaattttctcatgtcctctatcattttcatggagatgttttttaagatcattctcttctgcttcatctgcactgtgatgttcaggtcttgctggtgaatagttcctagtctccagtggtgccatattgagttttctgttgttggatgtgtttttaccttgtcctcttcttgtcctttcttctggtgggtgtagcaggagtctcttcctctcctggtgggtatgggacaagggttcccttctgatacatgcaaacagttccaatactctgatgtcagtcctcttcttgtggatggaggtggcactgtgaccggggcctcagcagtgtctaggtgtgctggatcccgccaccgagttcggatctggtgagcagacccctggtgtcagatgtccccgagcagggctgcagaacccttgtttttatttttaacttatttttggaacttcttttttattaaaaatatttttattgaaaataaaattttggtatcctacagtatattctgataactgtttcctctccagcttttctcacagatcttccctacctccctacccatccaactccacatcttctttctctttttagaaaacaaatgggtcaatacaaaaacagaataaaacaaaggaaacagaaaaccacaggaaataaaaagaaaaccacagaaagcacatacacatgtgagacctacatacccacatacacatgcagagacatacataccccatacacacatgcagagacatacataccccatacacatgcagagacatacataccccatacacatgcagagacatacataccccacacacatgcagagacatacataccccacacacatgcagagacatacatactgcacacaaatgcagagacatacataccccatacgcatgcagaaacatacatacccacatacacatgcagagacatacatacccacacacacatgcagagacctacatactgcacacacatgcagagacatacataccacatacacatgcagaaacatacataacccacacacacatgcagaaacatacataccccacacacatgcagagacatacatacccacatacacaaaacctgtaaaaacacaaaatcagaaaccataatggttaagcaaaagacaagaaaggttaaaaaggtgcctaaacaaagcatgagataaaaaataaatctccaaaaataccattcgttttgctttgcctatctactgatgggcatggggcctcccctaagtgtggtttgtatacttggtagacttcattggaagaaactaatatctatttttgtgagcagcttttgagatttcattctaattttaattagaaagaagattattttacatgtcaatcccaggtccttctccctcccttcctcacctgtcctgccaactaacaccctatgtatcccataccatttctgctccccatggagggtgagatttcattcataagagtagtttccaactagctggccattaccatcatttccaaaggctctatgaagcattttacctgcaaaaatgtttgcttaaagccagaagatggagaggcatccccagaaggagcatcaagggagtttccactgaccctttcatcttacagagaacctgaaagaggactgctggtaaactcccaaggaagacctgagatgttccaaatcttgaagtcaacttgaggagggaactgggaaacccctgtatcattgaaacattccttgccccgtgagtcacttacccttctggaacactggactctttaaaaagatctaaggatgctgtaatcaattgactggagatccttgatctatttggagttcttttgtgcaggatactagatctatgaaactatttccattcttctacatgaagccaccagtatgaccggcatcatttgttgaagatgctgtattttttctattatgtattttttttctcttttgctttgtcaaaaatcatgtgtccatacttgtgtggagttatgtctgggtcttcaattctatatattgagatgtatgttttcatgtcagtgccatgctgtttttattagtattgctctgtaatacaaattgaaatatggaatggtgatgcctccaggagtttttttttttaattcagcattgtattagctatactgagttgttttgtatttctatatgaagctgaaaaattgtaattttgatggagattgcattgaatctgtagattacctttagtaggatggccattttcacatattaatcctactgatccgtgagcatggaagatctttccatcttctggtatcttcttcaatttctttcttcaatgtcgagaaagattacacaaagaaaaatttgaaattcactcaaatctaaatatatcattgttattagcaataattctcttttataaactctttacttcatttctcattaattctgcaacagccagatgattaaattactaaaatccatgcctcatttagcagataagaagacagatttaacacaaccaatgtgcttgcttcactcctcataagagtgctgggaattatttccaacgggcccacaactctttctttcgtgagatgctttaattttgtgctattttcccaaacctcaaaattcagaaaggggaagcagagcagtttttcgtctgctagctgcttgtaattaccgcaaattcacatcctgagtaatcacgaataccttccggggaaaacacacagactgcctgagtgtcgaaagcagacagtgaaacttctggagagaacagctggtcggaggttgagcctgagagctcttgggacctgagtgaaccggcacaggagcacacaggacagggctgtgagaacaagtaggtactttaatgggttagaacccctaggggagatttgcttcggatgggcagacaggaaactagattctcatctgtcttttttgttgaccacccggtatcttagtttggaatctaacctctgggggagattgtgctttggattgactaccagggaactagattcatatcggtcttttctgttaaccacctgcacgaactggtgagtcagatgcccacttgggcctctgtttacttacttgctaaaaagcaaattatccttagatttcacctgatacttaaagtgatgctcttctatagttccccgtatctccccactgttccccagtctgtcttacaaaatgtgtacttgatgaagactggggtgccagcaaatgttaaatttggaatctataattataatctaatattataacacagaaaagtattctgcagagctgtttgcctgaatagtagcagtttttgatcctgtttcaaaagctgcgggccactcccacttcaccttgttacaatgaatgctaagggataaagcaccctctccattgttggatttggaggcaatggtgtcagttggcagacaaataaaactttaaaaaaaaaagaacttcattatgtggagttgctcctaaaataactatacatatccaaaataagcacaagagctgaaattaaaaaaaaaaacctacatgttgtcataaggatataatttaatagataaaatacacataaattctacaatgctttaaagtgcatagatgtttcctacagcattgttcatagcagtaaaagaataacagaaaaaaatgatcatgatcatgtgtcatatttaatgaatccagaaatatgcattcatttctatttttaattagagttaaactctacttacatacttgtggcattctaaccacaggaaacgtgtagtccagtggcgtcaagttcattcacattgtgacgccctcaccaccttgcagctacagaacttgctcatctttactaagtggaccatgtccactaaacagctgctcctcagcccttccccagtcctccgcagctactgttctactttctacaaagttaagcagagtagttggggtagctcataagtagaacagcacagcatctgactttctttgactgactgacttcgcttattttgtttttgaggttcatatatgttgtggcttatacttaaggcttttatactaattagttaaagatgtccactgacaaatcagtgaaaagaagttctaaatgtatgatgttgtaatttgggtaaagtcatacacaagaggagagagaagctatgagaggaaaaaaaaaaagaacataaactgtgaaactgatgatttcatactaaatgttgaggagtctagaacatttagattcacgcaaactttatttagttttagttgaaattgttgatttgtggtctttaaaaaaattggtcaattttaaaataacagcagaaagtaaatgcacatagtgttgacaagctagagagaatcaaccaggcttccagttcctaacatagggcttagaataatgtgtaagttagaagttcttggatgtgagtcccaggagttaaaaatcataaccggagagattggtcagtaagatttgttgaaaggaattgtgttgatgcatttaacaacaaaaatcaagtcaaaaatccaggtttcccaatacgggagcagctctggaaagagacacctttaacacacttccccaacatcacagccattcgtaggggcagacttttcactcaccagtgacagccaatgctccagatgcaaccagcattcctcttccattgtggtgccatccccacctcccccactaacaacaagattctggggttcattttggtacctttgactcggtggaacactgttttctccaggagtggagaaatttctccaggagctgttaatattgggaaggaagaagaggcaaggtgaaaggaattaatgttgcatagaagaaaatattgcaaggtcctgagcccagtagacacagcccaggtacatgcaagttaggcaaacagactaacaatatttacatttgctacagtgcattaaacacatgtaatgcatcagataagtgcgctttgtgactttcagttaatgaaataagcttattatttccggagtttctaatatatgaaatatacttaacatctagggtataagacccttagaaggattaaaaccttaggtattctagtgcctggaattcaacatgagtttttttttttttttaaaaaaaaaacgtggtgcacattctggattagacatgttctttttatagactcacccaataatttaacggagagaaaatgaatagtttaagactagagagcataactgcagcttcagtgtgaggttctgggagatgtgatagagtattgaactatagagaaaggggctaaaataaaggctttgcaggacaggcagtgaggtgaatacactcagggctgcagagcaaattctgtttgaattactaacctccaaaatgtggggttccttgaaacgtttgcaaatttccccaataccatgtttctttctcatcatgggtgaagtgcagcagcaagcaagctagctctcccatgctacccctgaaactcagatccagttgtgtttgtagaacacaagccagtctatggtcgtcacacctgaatgtaccaaattctcatctaaagagaagccagccttcttcactccttgcagactctggtacctgtgagtgtctgtcagtcaagccctaggaactaatgagttcagtgcctcttctagcatcatcagtatcatacttgacatcaagaggatttagggacctgctttccaatggacattgttactcatgaaagagagaaagctggacacaactaccaaaaacgagatgacctgctggttggtgtgcctaaggaagccacagttcttggggtaagtccatctcattaggagaacacacaaagatattataattatgtccacactacggagctatagtgagcagttgaatgtttttctctgttgtgatgatcctcctggactggtttctctcctgctcatgggtccccacagctgcttatgatataattattcagtggctaatattaagtataattgtttggctgatggatcaggcttattactggctatctctctcttctaaattaatccatttttaataatctgtgtaccaccacatggccatggcatacggtaatgttctggcatcttaccaatttggcagctacatggcatctcccaacttccccttcttcctctccacaactctgtttggatttcctgcctagctatattctgtctgaccattggtcaaatcagctttattcatcaaccaataaaagcaacacttcagcatacagaaggacatcccacatcaatagtgggtctgggtgcatccttgacttgtttctggctgattccgcaatctaaccagaatgtgaagtggagctgtttggaactacattctcctaaggctttcttttaattaaataattaaaaccatttgtgcttttttcaccagaacactgcatagttaagatattaatttcttctcatttgtctttagtgtagacttatgacttagccatatggttttatttggtctgattaagttcagtcttattacctgaagttttttgtccaaacattttcagatgatgtcatctggattgcttccacccacaggtttctctgtgtccacgtgggctgctgtgagacatcccagtatccatcaacatcattatccctcataagcaggaacctgtttatcatgaggttctgaatagttgctgttaagacctatcttcagacaccttaccaaatgtgtcttctgggattcaggctctagtaactccatcatacccttttagaaattaagtttaattgaaatggaattaaaacctctactgaaatggttggacaaggtagactaagtgactcccaaaacaatatagataatggatgtagccccttggttgcttctcaggttctggggagggtccttactgctgaagacttaggactcaggtgattcaagatgggtctgaaagcttctttcctttgggttagttcccatggttccagaaaatactctcccaaggaaaggaaataagcagtcctacccaactgcattacttatgatccacaactatccagaatagcaagaggtgaatagaggtgaaataagtggcactcccatgtcagtggcacccaacagctgtctaattggacctacagccaactcagcttgagggaaatggtgtggaaacctaaccatccactgaggctagtaaggttatgggtcttaaaaaaaaaaagtaatcaactatagccacttagctataccagcataaccccttactgttgtaatttaaaaatcggtgtgaggcagaaagacgccatgtgacagagctcatgtggagggttttttttggggggggtggatgggaaaaggagggaggggaggatggagaccagcctctgggacaggagcagcaaaagagaaaagagaggcagggggtagagacagagagataggcagaaaagcagagaggggggttcccttttaaaaagggaacggagtgaatgtgcacaggtgcgaagctggtgctcttagtggctgcagttgaggatgtatcctgtcagaaccccaagggcaagccagtacaaatacctgaatactaacatttacatcatcttaaatcttaatcattagattctttacccctctttttttttttttttcaaatgcctcttctttgttgagccagcagcacattatttccagagggtgcttcatcagcaattctcaccacaggtcactgtaaggaagttagcattgttcttttagctgtcttctcagccctggaaattcccactttagaaactcatgtcatcttactcagtgaccgtttcactaactgtgcaccaagaccttgtcccttacatcactaccactgcttccagcagatagaagatagatagatagatagatagatagatagatagataggtagatagatatagagaattatgtatacatatatatatattcatattttcttgatgattatattcctgatccttcctaccgtcttggtggttttctttctctcccaaatattttaccactgcttttttaccacatgtgtgggcacacatgtgtgtgtatgtgtgtgtgtgtgtgttttgtagtagagaaaacataatatttgtctttctgagcttgtcatatttatttagtatgttgtcctttgttccacccattccacaataaatgacattattttattcttcttctcggttgagcaaaattacattgtatgtaaagaccacattttgcttttccatctatctgctgatggacatctaaatggtctcatgccttgactatttttgtgcagcaatgagcttggatgcgcaggtctctcggcggtatgctgactttgagttccttggggatatacccaggagtcatcatctggatcctatgctggctctgatttagttgtagttgtttgaggaaccaccatgttgatttccacagtggccacactggtttacattcctaacagcagcatttaacagttcctctttccccacctcctcatcagatgtgtggtcatttgttttcttgatgatacccagtttgactgggatgagaaggagtctgaaatcagtttttatttaaattcccctaattaatcattaggatgctgttttttttttaataataagtccttgtgcaactcaactccctcatgctcctcatctgtaacacagatgtgacaaatactactgacaatgcagacaccttagacatgtaaactagtctgacacctggtgcatgacaatcacggtgattcttaaattcaagtgacagataaaaatggatgagtggcaagactaggaataagatgctcaatgactgtcggttaaagctgaggcccgcatctacactcctgtgggaagtcccttctccttattcacctaactatgctctagtctagacaacttttcccagtgactcttccaaaaaggaaatgttttgtgaagtagatttttcagaattacaacattcacatcatcacttcctgagtttaaagagcctttcaaaaaaaataaaagaggtaaattttggatttttctcttagaacagcttacttttccttgtgggattttcccaccttttgatacaggaaatcattaactattttacactccttataagtcagagtgtattcaaataatcctttgcatctacttaaagcatattctagaaatccctgtcttgtctgttgcagaccatccagatactatgtgccctgacgattgcaagcttggggggcattttggtgtcagcttcctactcttcctatttcaacccagcagccttcaccactttgatgactgggtacccatttgttggattcctgtgtgtaagtaaagttttatctacaaaagtgaccatggtccctgcttggacacaattacacattgtgcaaaaaggtctgcacttgtccccaaagcacaatttgccctggagttcactgtctgaccagtgatggcagcctccacaactcattagtgaagctcctactagttcatttttggttctcattatctgcgacaactcaatactcactccacaggcataatcaatgtttcagcttcccagaccatcatccctctacttgctgggcccctagtaccactgtgatcaaatactgccttcttggtggctataatcaaagtttcatgtcagaacttgacctcctgatttcataaactttgggtaatacatattccacctacaccaatagcttcaactccatatttttctgtctcttgtcacatgagaagctccttcctaggtgcttctcttggtttccttgtctccatattgtctcaagtctcaagtcattgatcttcctcgacctcccctttcaatattagtaacatctgtcaggaatttgttgaattttgtctgcagttactgctttccaataatataaacccgacatccctgagcaggtgtctattctctaaagtcagagtaaccatcccaagtagatatgaagcctccctagcaatatggacatgccattcctgtagggctgtctccctagaagtttcccattgcttactgtgagtgatttgaaagcagcttaggccaattctttcttttctctctctttcctgaacagtttgccgttactggatctctctcgataatctctgggaaaatctcagtcaaaccttttgtaagtatgaagaccaatctccagctgttttaataactagaacctcatagttaattcttctagttctgtccctccactgcacagtttagggaaacaaaactaaggttagggagcatatgttcttcaacagacctcctgacacacttgggatgtcacttctgaagtgaatgtgttcattttccaggtatgatgggagaaaaactgaaacccagagtagaaaggcacttgcctggtctctgtctgtctgtctgtctgtctgtctgtctgtctgtctgtctgcctgtctctatctcccccccctctctctctctctctctctctctctctctctctctctctctctctcacacacacacacacacacacacacattagtaacagctgagatgggagtctacatttcctgattacaagcccaggatcatgaccccatccaatgcagggaactcttcaaccactgcacaactcctgggttcataccgcagtttcagtcatcagggacatgtgccagctcctacactacctttgtgttctcagccatagctagccagaccctatggcttctggagtcagggggtatgtggtagtcaggggggcctgctaccctcaggggcaacaatgttttattgttatttttgtttttgttttcttggtttttccagacagggtttctctgtattactttggaggttgtcctggaacttgctctctagaccaggctggccttgaactcacagagatccacttgcctctgccttatgagtgctgggattaaagacgtgagccaccaggccctggcagggcggcaacagtgttactgtttcctcctactgtgtttttaatgctactgcccactcattgtgttattgaaaggtgggcatagctagaaccacaggatctaagcccacacaccaatacttcttgccctttcttggaaggtccattccatatagaggaatactccctgagccaagacacacaggggggtgggcctatcccaaaggatacaatagactctgatgacaccctatggaaggcctcaccatccagggagagcagaaagaatatgtgatagatagggttttagttgtgggggaggggcgggggacggagggagaagggaactgggattgtcatgtaaaacaatcctgtttctaattcaaattttttttaaaagttgaaaaaaaaaaagaaaaagaaggtgcacattgtcatctgcttgtcccatgaaaataccttgtcttcccttaggcccaatctccttgcagggattctgttaaaggatctcagcattaggaaggttgagaaccactgttccaggttatcaaacctcttcagttaactttcattattctctaaagctgcttctttacatgaggtaaactatagtctgggttctccagaggatgccaaaggccatagtgtaagaggtcttcaaaggacagttctaagagcactggggaagtcagtggagatactggcagcaggctgaggcaccccaccttggtgttcagtgtcatgaagagtcaggaagccagactgtggggagctgttgacactctcccattcaagacccattttctgactgtctcatatgacaaactgcagagtgctgagcaatacaaagacaaattatcatggtctgcccgataagaggccacagactatattataaactaccctgggaaagtaccattgcagtataataggcaaaggggacagagcaacctgcaccaagtctgagatgagaaccccacacagaacctctcttctaggcactgagcaacttggcctccaatacagcaagctctgcagttgctacaattggcttcctcctcctcacccatagccttatagacatggggactgcctctctgcactgtaattcagaaaaggaatttctgtctttattgccttattcggaatcccaccattggatgaatgaagacaagagctgtctccttgcttatgtcagtgccatggtaagtaattccaaactaaatatcttgtcatgtaaaaccccagtttctcccctgtgggcaatttctgctttttcagcaatctttggttttgctggtctgactgtctggggcagacaggaaaaaaaccaaacacatgtggcagaaagttagcaaattgtgtgttggggatgcaggaaacacagcagaaacaggagagggtaaggagatgaagaaaagaaaatacagtggagaattttaagtcacaataggcaatgctatttttttttttttttttttttttttggtttttggtttttcgagacagagtttctctgtgtagctttggagcctatcctggcagtcactctggagaccaggctggcctcaaactcacagagatctgcctgcctctgccccacccccagtgctgggattaaaggcgtgcgccactaacgcccggcggcaatgctattttttgttatttgtgttgaacttgaacttgggaagctctctagggttgttgtatggagttagaatgattcacccattagtgatgcttgccttttgttcacatgtactccgagacttggagcagacacaagtgcttaattccctcatgtacacatctgctcagggctggcaaaaagggaaagagggtaggaggcagctaactaggagatatgactcctgtgaaaacatcagtgttcctgggcagaatttccttggcacctttctcccaaattttaacagccaccacctattgatagtaacaataaaatggcttagtccattttaaatgtacggttatagtgtctacaccataacaatgttccttgttccttcatgacttctcctaatgggaccagtgaatgaccaagctggtatctttcattccctggtgtctgtctgacttaggagtcttggagaatgagtgaaggtttttggactcacatccctttttgagtctgaccatgtgagtagatcagaagtgtttaggaagtgaagaacagagacttatcttgatagacgtgagcctgagaaagtccaggagatctcggcaagacagacagggtaaagccatgtgagagaagcattctcccattgggatactggggcattgttttaattgggattaatttcagtacatcaaattgtctgatactctcatacaggcagagccaaaaagaacttcctctcctcaatattagaaaaattgcaacatggcagagtaagccaacctcagagggatgctaatatttaataaacacagcattaacctgaacaaaaaaagtaatgccgtgtgtgtgtgtgtgtgtgtatgtgtgtgtgtgtgtgtgtgtgtgtgtgtacttaagactgaaagaaaataaaaaggagctggagggaggaagaataaagatgacgtatgcagaaactaataaggatcatcaaagcagaaaacagggcgagtctgaacagacacaggtgctggagacaaggatccaaaactgttaatgcccagggtaagggtttagggttgttaggctcctctgcacacaccaagagccctgcacatgtattagaaataaagattgaaaagtcatttgactttagacagcctgacaggaaatggtactcagtacccccagaaggctcacacatccctgccctcagctcactcaaccctgtacagatggcacatctaaactcacagttccatggacactaggacggcttctgataaaggggatttaaaactgcctctttatccctgatactcctaaggtccttacaaaatcggacttaaagaagctgtctagggacacatcaataaattccacttataagattctcacatattgaagacacacactaataccatcactgtggcatatgcacttaaactatgtaatgataaacatatgagaaaaacactcaatcctgtttaatgctgtaagaaagcaggctgagcaagctggtaagcgatttcctccatggcctctgcttcagttcctgcctccaggctccttccctaagttcctactttgatttctctcagtaatggtctctcacctggaagtgtaagctgaaattaacccaaggtgctttgggtcatgatgttttacaacagtaagagaaaccctgattaggacaaaaccaaaacccgaaaacaggacagtatgataaaaaaaaaaaaaaaaaaaaaaaaaagtcagggggacttgttaaagaggaaccatgactagcaataaaaataaaaataaaaaaacttagaaattaagaactgagaacagtaaaaagcagatttaatgcatctgaggaaatatctcattaaatcatattaaacttgaaaaaacacatgaatgacacagatgctgaagttagaaggaaagattgaacatgaacatgagttctaatagaaaagtttggaggaaagagagactctgaaaaaataattatctgagaatttttcaaaatcgaagacatgagaaggaacccagagaagaccctataggtaagtgaattctaatctacacctgaaaatgggatgaatgaaaagcaccaaggacaaaggaaatggtgaaagcaagtagagacagatggccagtcactcttacttctcatctctgtgtggtcattaagaactccgaaagagaaaacagagagaggatggaaccattgtctctgctccttctggtctccatagttgaaggcttcaatgcccaccccaccccaccccaccacaccccacccggccccaccccagccccatccctgcccctatctcctctcagtagggcccaaaagctttgtatggggtcccacctaggcctgtgctgctttgcagagtgggctggcggtgatgctcgtcttcactgtgctggagcttttgctagctgcatacagttctgtcttttggtggaagcaagtttactccaacaagcctggggtaagttctctgattatttctgtgatacctgcagtctaccaactctgagttgcaatgatacaggcccaaaggatcagatggaaagtgactttaataacgaaaataagagttcactggatagaaacctgggatcagatagtgactatagggcagcaacattgaaagataaaccctcccccaagaaactagctggttctagacattacttcatgagtgacccaaaacttaaataaaattacaccaggaagaaacagagtttatactgccttgtacttatgcacactgacatctgtctccatggccaagtgcttgctaacatgattttaccaagactttattatttttttaatgttttcctgctcttccccttgcttcctcttagtctcttataatttcaaactttttatttcttctaaatgctacaaaaaagaaagcattataatttgaacaagttatgattcaacttcaaggctacaaggaagcaatatgatgaggaaacggagggtgaaatttgcttgaactaatattgctgcaactatatactatgatagagttgcaaaagtattactataaaatattataatatatattattgtatttgagggaaatattttaaaccctgccctccaactcaaagtgttgaaatctattaataaatgttatccttctagagtggtatttttcatgcctgagtcacaagatcatacccaagttgtcaaaagcagtttgttgaggccatggatatgaaatacagaagaaggaagaaattcagtgttcctggcagagcacagctagacattcctgaaatctcagccttggtagatccgaataaacttctgaagagaaactttcctgtggtgctttcaatatgagtcacttcatttccaatgaaaaccatttcctctaaatccaagtcagcaagattttatgatccaccattccacaataaccacagactttatacagttctctaaacagagtgaacagacagtgtttcatctgtctaagttagatgtgaaagtgtgccctcctctagtgctgggggctgacgaggtcctgcatctcgataggatctttctctgtgttatttacacatttctgttgcttaaatattagatgtcatacattactagaacatttgcaatcctttgaaaagtgtgacagcctgtgcacggatctgggttctatccccagcaatgaaaagtaataataaatcatagccaggcatgatggtacatgcctgtatccccagtatttaagaggctgaagtaggattgccctgagttcaagttcagcatgggtgcagagggcgactctgttgcaagaaaatgacttatttctgtctcacttaatgatttcacatatattagggatgcggtattgaatttaggaccttgcacatgctaagaaagcactctaccactgagttagatccccaacacattggctttaatttctatttgaattcaaagactataattaatcatgatatactctctcatctaagcactagactgaataagccattggacatagaaaagcaacagcaacttcaatcctggattggaaaaatcaacattgctcacccaagagagcttccaatattgctttccagagagaactgtgcaactgaaataaatatgtaaggtttccaaacataccgacacactatggaaatgcagcagtacatagaccagtcccctacatgcctgagaacagtaaaaaagacaagtgaaatctatagagaactcagaaagcagagtgtaaagagagttgatctctttctcttggattcactttgtgtgtgtgtgtatgtgtgtgtgtgtgtgtgtgtgtgtgtgtgtgtgtgtgtgtgtgtgcgtgcatgcgtgcgtgtgtgtgnnnnnnnnnnnnnnnnnnnnnnnnnnnnnnnnnnnnnnnnnnnnnnnnnnnnnnnnnnnnnnnnnnnnnnnnnnnnnnnnnnnnnnnnnnnnnnnnnnnnnnnnnnnnnnnnnnnnnnnnnnnnnnnnnnnnnnnnnnnnnnnnnnnnnnnnnnnnnnnnnnnnnnnnnnnnnnnnnnncgtgcgtgttcacttgcatacacaaacctgcacccatgtgtgtatacatacttgcatgtgcctcagaggtgtcagaggcctcttacaggtagttttgagcccactacatatcagtgctagaaactgaactccagtcctctgaaagtgcagcacatactcttttcttttcagcattattgtcatcatcatcatcatcatcatcatcgtcgtcgtcgtcaccattttatacatcttaattaaaatataatgtcatggcacaaagagggcatgctggtgggctgaccaatccagctaccacccagacccagggctatgagttagcctaccccaacacccacctcatctatggactgctagagtatgtgaaggggccagacctgaagatccaaagttgcaggatctccatgacccacgacaggatatccaagaggagtcccagtgagggcccagtgtcaatagtgtagaagaagccagaggcctagagtcagaccaatgacttgttgcaatgaacacttacgagtaatgacatgtggactgaagggtacactgtatgactcactgtgactttgtttggttttgtttttcctttttattttaaaaatttattttgttttaggggtgagatttcaaggtcaaggggagaggaagatgaatgggatcaggatgcataatgtgaaatccacaaagaatcaataaaagtttttaaaaaaatacagaatagcatcacttctctcctcccttttctccatccagcccttcccaagttccctcccttgaatgccttccattttctccctccaaaattgatagccttttccttcctgattgccactggcatatagatacatacatatgcagaaaatattaatataattattataattaattattactattatatagccataataaaacatagttgtgggtatgtggtttcagggctgaccccctttatattggacaaccagttagggttctcatccttaggagaggctaactcttcctatcttagcagtcattaattgccagaagttttttgtctaggggtagaaccccatgagatttttcccccttccacattagcacgtctactgacgctgacattgttcagatcttgttcatatagccatttatatgaaagactgtttcaagcagacatcctggtattctggctcttacaatctttctacatgttcttctgacatgtccctgagccagagatgcaggagctgtgatagagatgtgctcactggagctgggcttcccatgatccattgatctctgcattgtgtccaggtgtggttttctccatctgctgtaaagagaagattctttgatgagcaatggcagctacacttatctgtggcaagatttagaatgtggttaggaattatgctgacccagcaaagtggaggtagtaattttattctaaggtcctaacctcactatccctggtgagggagaacataagttattgcctttctggatctgagttcctttactcattgtaatcttttctagacccatccatttgcttgcaagtttcattatttcatttctctttaaagctaaatagcattccactttgtatatgtaccacattttcgttatctttctgttcaaggacatttaggtggtttctatttcttggatgctgtgaataggacagcaatgcacaatgctgaggagtgtctgtggagaaagaagaatgtcaattccttcgaacacgtcaaaggacatttggtttagctggatcatagggtagattcatttttagtttattgaggactcttcatactgatttccagaatggctgcaccagtctacatttccaacagtgactgaagactccccttccccccatgacctcaccagtctacatttccaacagtgactgaagactccccttcccccatgacctcaccagaatttgttaccagttttgtagaactttgctattctggttggaataagatgaaatctcaaggttgcacacttttttatttcttagccatttttatttcttctgagatctctctgtttagatcctttgcccattttttaaataggatcatttgtttccatgactatccgtttttttaaaattttcatgttcaggtattaaccctctgtcagatgtgtagctggccaagattgtagcagaaccctgctggcctggagccagagtgctatcaactagccctaacccccactgggcggaaaacctgatcaatcaagactctgacatggcattgtctttttggaagcctcactcaatgtattctgagcatatggtaatcaaccggctaaagtgtaaatgttgagaaaaataaaaatgccctgggtggagggaaagtactcagtccattgaggctgaagacccctgaagttgtgaaaggctaagttcattcttaaaagtgtgtctgagtctgagtcttctttccatggaccctcgtgaacccacacccacaaggctacctccacgacacaagattccctccaactctggatcccttcactcaactgactacttccttagcttcttcaaaactcttaaccactgggccatctcttcatccccgagagtgaatcttaaagtttctcaccacaagaagaagaaaaggaaaaacagtagcaatgtaaggtaatggataccataattgccttcatcggggtaatcattatacagtgtattaaatcactactctgaacactctaagtatctttttttaatatgctttaaaaatctggaaaacatagtcacagttcactatgtttatactattaagagatactgttaataatattttttcctaaaagaaggaaactccatttgcaaaaggatggaagtatggttgacagtaaaaacacaggctttgaaggtagaaggacagcatccttcacctatcccttggtatttattctttggcagtttggcctttctgcttctcagtttgatcactgttcattgccaaatgtgccactgcaatgcacattgaaacgaagcacctaacagtgcctgagacatagcagactcgccaaaggcttagctcctttatgcttcataagcaagttcatgaaaaattcaagataatcagtgtatacaaacaacagcatacaaaggtatttgtgattgctgcaatctaggaactatttgagatgattcttgcatatattgtgtttggccttactaaactgcttaccttggtgatttagcagttgaaatcacaacaaatacacgaatataagagactagcctgaaaagcaaaattccaaaccatgtataattataattagtatttggtagagtaccagagcataattgtgaaatatatgtgcatgtatgtatgcatatacatacatacatatacactaatacagatacaggcacttgttttgtgtgcaccatctacataattttgtgtttactgtatgctttttaagcaagctgataacatagcaagttttccaagtttcctctgtaagaacgagaaggctgggacactctagaattctcagattctgtgactcaatgactgggattctgtggttctagtactatgtaattgctaagggctcaatgtggcggactccatgtgggcctggaggagaaatacatcatgattgtgactgcaatatcctaccactccttctcctaacagagctctgccattgaatcatggagtcaccatctgaggagaaaagaagggcccatatcatcaatatagattcagatgaaactgtcatgactgcctttccctacagacctcataactctttactggatttactgaagggcgaaccaaaagttttgggggtgagttctgccttatcatggatcatcccagaatgggaaaagggggcctcatctccatttttttctctacagaggttgctttgtgcaatagtgttcatagaaggagtttgtccccctccctggcatttatttcatcttgcaatgtacccttctgcagtcaagggagctcactagtctccacccttcacagaggaactgttgacaactcttgtttgctggggggcaaaaaggggatcagtaattttctctaaaattgtagctactgacaagttttgcacatgctccaataaataaccccatatccctacttttataagcaactctaattaaggtcagcaagtcaccaaaaaagacgtgaaaactcaggactagttgaaaagaagaaaaggtcagcatggatgggaaggttaacgtgttaatgtgatagatacattgtttacataaatgaaatattcaaaagaataaaaggcagaacatctaagtcaattgcttgtgaaaaaatggatccttcagagaaaaagtatgtgccatttccctggattttgcttaaaatagagaaatgaaagctctctttagaagtgcaatgcacagtttgccttggctctgtcttatacttaactctcagctgtcaatgcagaaatctttctgaggtgatggactaagtaactttcaggagtgaacactccaataactcacctaactccagagaggtcctatggctgtttcatggggagcccgttctgatctttgatttccaacactggggaagcagggaactatgtaatttttccaagtatcttcttgaggaagtggccccagggtatggcagtacttctcatggaagccagtgaaggtgaggtcaaagtccatcagtggaatataggtctaaaggatgcataaccacgggctccaacaacatggaatgaaaatgctttttaattatgcctgtactgaacatgtacagctgcttttcttatagcctttccacagacagtacaacagctacttcctgttttacacctgttaagtattttgttcacttctaggcagatgatgctcagtcatttctggtgcttgtgtgtgtatggtacattgcattcaaccatcctaggagcaatttgagtacacaggaggagagcattgtggtaacacaaggctgtcattccagctttgggaggtgggggcaggagagtccagtgattactgtcatcctgtgctccatagtgacactgaggaaagatcatcctgtgctccatggtgacgctggggacaggtcatcctgtgctccatagtgatgctgaggacagatcatcctgtgctccatggtgacgctggggacaggtcatcctgtgctccatgatgacgttggggacagatcatcctgtgctccatggtgacgctggggacaggtcatcctgtgctccatggtgacgctggggacagttcatcctgtgctccatagtgaccctggggacagtttggaattcaggagatcctgtctggaaaaaaatgtacaaagaggatatgtgtagattatctacaaatattatgacattgttaatttaaattataaacaatcgtattttgcatagcaatcccattccctctccctccaatcctcctatgcctcccctgcctccctccccatccactcccccaggagggtgaggccttccatggggatcatcaaagtccgtcacatcatttggggcaggcctaggccctcccccatgtatctaggccgagagagtatccctctacagggaatgagctcctaaattccctttgtgcgttgggagtaaatactggttccaccacaagaggccccatagactgctcacacctcctgtcacccacattcagagggcctggttaaagtggagataaccttaaacgaattggtacaggagatcatttcctgagcataacaccagtagcacaggcactgagatcgacacttaataaatcacacctcctgaaactgagaagcttctgtaaggcaaaggacacagtcaacaagacaaaatagcagctcacagaatgggaaaagatattcatcaaacccacatctgacagagggctgatttccaaattttacaaagaactcaagaagctagttaccaaaactccaaataaaaagtggggtacagactaaatagagaatgctcaatagatgaatctaaaatggcggaaagacacataagaaagtgttcaacatccttagctttcagagaaatgcaaatcaaaacaactctgagataccatcttacacctgacagaatggctaaaatcaaaaccaccaaagacagtttatgctggagaggatgtggagaaaggggaacactcctctattgctggtgggagtgcaaatttgtacagccactttggaaatcagtatggcagtttctcaagaaaatggcaatcattgtacctcaagatccagcaattccattcttaggcatatccccaaaggatgcacattcatacaacaaggacatattatgaaatttttaacataagagacttaagcatcctcagatttcagtcctggaaccaagcctcccacctactttcccatgcaaaccaaggaatggctgcacttagcactgacaatgtggaggccagttttgaggataagcaagatgtcagtgtgacagaagaggaaaggtgtacgggaatagtttgcagtctaggtttagtcacacacaaattcaaatatgtcttctacaaaatatattggtgattctgggaaatagtaaaggacgagaatgaagagttataattgggagggtctcagcatgatggagacatggaaaatgtttatattggggtggttgcagccagaggtgtgcctggggcagcccacaggcctgggctcttgttacctcatgttcattttctccttccaggctatccagattcttctgtctctgatcattgtgggccttgggattatattagcatttaatttcatcattttctccaaaaaatttcctcttgtgatcatcactggatatccattctggggagcatttactgtaagtaccacctgctaagaacttgtcagaaattgctatgaagactaatgtaaattggattcagccccatgccaatacattttataagtgtgccccttctgggacaccaaacaggcagaccactccttacaaaagaaattactccgtatttcaccactggctactggctaccaccttcatagtgatgattgctcctaggtacatagtgtttttccaaagcccacgggtatagtacatcccgcagtacctacctgggtaatggaacaggtagatagcctacttgaccatgtgcagacacagtgtgaaaagaggaacacatgcagatagaactcacagaataggactcagtgaggaagaaaacttgagggtcaccatagctcagcacccttcttacctcagggggctcatgactgtcactcacagggaactatggagccattaataattccagccttggttcctaatcctatgattagtgtacacacttaagggtaaactcactagagtatctcacataacatacaagagggcaagaatggggtctgttttactcagaaattaaaatcatgcttgagatatgagatgcatgaatgaatgcgtggatcaatcaataaattagtaactgaaacaaagaattaatgagaccaccatctctattaaaaaccagtaatgtgccatttctatcatttgtatttcaaaaacaaatatttcatgttcctagtgaaatagcacgatgttgatttctaaactacactcactgtatcgtcaagaaccaaatggacccagtcttcaccgcctcattctccaatcaatttctcccagtatgatttgtgagaatcacaggcgtgaattgtagtaaggtttgatttattgcttttaaaaaaaaatccactctgcatggtacagacatttattgaaaacacaactacatcttcttggtaatgtcccaggtctgtaaatactgttgaacaaagccctttctgagaaatgtgaaagatgtttttactcttgctataagtgctcctaggaactgtctgagggtttctggccccaggggcagaggaacgcttcctacgtggattctcactagctgagggagaagggaagaatgcatgccctggctatgacagaaggcactagctaagggtgctttgtaggaaaaaacaagtgagaaaagtgcctgattgtggcatcaaatggaaccacctggtcactgtccactggttatctgaagggcatctgacctgattccatttccagctattataaagagggtagcaatgcacatgacatatgtaacttcaatattcaagcaaatggcgtctgctgatttttttccttctttttgttgaaaggcgtgttctcattagagtacactgtgggtttttgagtgggaaatgaattcaaggatgacagccattctgggaaaattgattagagtgattagagttgcaattgcccagagaaggaaggtgatactgtggggcactgagagaagggctttgagggcctggaggatgagccaggtggaacaaaagaaggtgccagcaggaacttcccaacgtctatattgcaacataaggactttagattctaagacccaagtgtccccaggtgccaatgccaacccctatagatggaattaaaacaagagccttcctccctaacactcaggttagaaagactagatgctggaggaggagggggagtagtaccaacagtttgaaaacccaaaggagaccgactgtgttgtagccggattagatgtgccacctgttaaccgttgcctcttgtcttctcaacagttttttctgacaggattggtcacaggattcaatgaaaaatcaagacaaattctggtaagtagtttttacgacttctacctgatttcaaatctatttgctttgtagcagctttggtcttaagcttcagggttccttgggaagatctttatgcaacaagttttcggtccaaacccaacctgtgggtgatttagccttatgttctttccttttctcccacttctctgagcaaacaaactgaaagttactcattgggaaccatcctatattgctgtaattaaataatttttaactgggagtagccttttgctccttctctctccatgagaaataatagttttcaatgtccaacgatattttttgattgtcataactccgtagggtatactattggcagctagatggtaagagccagggttgtctctaagcatcctttttctttttaggtttattttttattttatgtgtaggagcgttttacctggtgcccacagaggctagatgacagtgtcagattccctgtaactagagtcacagatatttgaaagccactatgtgaaactgaacctggatcctctaaaagagcagccagtgctcttaactacttatccatctctttagccccctctaaacaccctttaaaataatggaagcatgggaaggtctcctacaataaaaaaatcatttgaccaaaatgtctacagtctcaaagttgaaaagccctgcctcaaccaacatgcatcacagaccctgtcaccctcgctttctatccccaaccccaactccaatgccaacaaaggctttcctcagaggcctccccaaggaccagataaaaagagtggcactgatgccacatggttgtaggattgagtcagagctgattgcctctcgttgctctatcaacttgatgggaaattgtctaagagttactctgaggattaaggtattacttacaaaaggcatgatgatgtttaaatgctcctaccctcatctaataatcactgcagaaaaccctagagctacaggcttccactcagtcactgcatctattttcatggccttcagtcagggatagttataaatcccagtgaggtcctagggagagggatgaatgcctccatctgctcctctggagataagtactgtcagtccctatggtatcttcttccagagctgagacatactcaaaagttatctgtgccttgtggagagctttacggatggaagaaggcatggcatgacacatgagtgtgggattgcagatctggttttcacaaaagcttttccaccaagcatgggatggctcaaagtcatttagttcctaatcccatgcatctctaaaacacagagagcaagtgtctgcctgacatcacaatcccttaataaggatcaggctggactagggctgtgatctttgtaaggcatgatctgcatgagggatcacatatctagagaccttagtctgttaatggtccctgtagaagccaaaacagagactggaaagacaaaaggacttaatatggagagagattgacagatttgcatgctccttgtttttgttttgttttgctttattttgtggtttgccaaaaacacttgctttcaataaagatctcagtttaggataaacagttgcaagtgcacttcccagtcttgctgcactaggttacacacagctctgggagtgtggaaatgcatggcttcatttccaacattagcagacataatgcagccagcagaggtacagtagatacactctgaaatgacactttttataaaaaaaataagcaagaatggacataaaggaaataatatgatgccccaacacagttttcttgtaagaaactctcccacccccacccccttctctctctctctctctctctctctctctctctctctctctctctctcacacacacacacacacacacacacacacacacacatacacacacacacacacccctctcctggcaaatatactgggaatgaataaaagcaattaagcagagggtacccaacactaactgacatatctacagtacaatcactacactgaaggctcagggaacatcatggaagatgaggcagaaagactgcaagaatcagaggagcagggcatctattacaagattgcatattctatatatgatagggatgcatccatgacctcgacaaagttgcctaaataagatctgtagaatgacacgaactgacatgccaacatgaaggagaaatatcacaaggccccactcccagaactacaatctagtatctgaagaactacaaccaatgactgatgagatagggacaatcaatttgttccagagataagtccccagtagatgatccaatctaaagagttcaaccctaaacatacatacaaatgaacaatgctaaattaactctgtaggttgtattagaaatttatatgtatatatatatgtggaaaataatcactaaatattaagaggccatgaatttgaagagtgaatggatagaagaacatgggagaagttggagttgggttgtggtggtggtggtggtgatgtaaacacaatactcacataggagattctcaaaaataaataaaataattttaaaaattaaaagaaattgtggggagcaatcagctttttatgcctcccatgtggttttgttggccatcatttgaatcttcctggggaatataagtgagccagatggtgagctgtcagttcccacatgagtctttgtatagctggggtcttatgtggtgatgatacatatttagcatacactaaatttttagaaaataaatgaatactacagtaaagccattctcattctttttttatttttttcttctatttaaattaggaacaatcttattttatataccaatcccagttccctgtccctctcatccttctctcctcattctcattctctagattctaaagatagaaattgagactgggacagattaaataattggtacaagttctaatgaaagcaggacccaaaaccaaatctgatttccaagttgaaatgctttccaaggcaccgtgtccttcagaagtacggaagatagtttgtgctgagatgagatggacattttcaggagtgttaaccatggggtattgctggcccattctacagtatgctttgccttctgactttgaccagtcagaattgaacttacaaagccttccaatcacagggacctaatgaggcttctagaactaggaaagtcctgagaatttctttcggggtatctttacctttcgtttttgtttactttaccatgtgttaaatctattttccagagacaaggaatcaccaacatgaacatcatcagctcagtagttgcagcaattgggactgccctgatcctcatcagctttacacaggagaacaaattctgtcaggcaccctccctcgatggaacctgtattgtaggcacagcacttctcctcgtgagtgatctgattctggatgaggagtctgagcagctttagccaggctgtgtccatgacacaatgatgagttgatttttacccctgaccttaatatagtctcttgatttttattcctacttttagctcctgggagcttgtgaccttgacctaacattgtagggtctccacatcttggttttccctcttgtaaaaatttaagatagtaatactattagctacctccctgggctgtagtaaggattacttcaacagtggtaaggattaaataacacctggcaaagtatacatgctcaatggttttttatgattcatttcaattctattcaaatttacttttttgctaatcaaaaaattgctcaattgatatgaaacaaaatacagtagcagaaagtacttaagtgaggtatatcagtatttttaatacacaagccattttatataattgtataatttttactcagtatggtaaatgatatattcatttaccaggaaatacaattatatgtgaggtttttattttatttatttatctttgtaggtgttttgcctcaatgtgggactgtgcaccataggcatgcctggtgttctctgaagtcaaaagatagcaatggatgctctggaactagaattacagatatttgtgagccacaatgtgggttctaggaattgaacccaggtcctccaggagagaaccagtgctcaaaatttctgagctatctccagcccctaattatagttaaggttttaatggtctgttttataagtaatatgtgacattataattatcttgattattttttcccttttttattattaattcaagttaggaaacaggcttgtttcacatgtaagtcccctctccctctccctccactcacccctacccctcctctcccacctccaacctaccccccaccccatccacccactactccccaggcagggtagggcccccaacaggggctccacaaagtccaccaaatcttcctgtgctgggcctaggcccctccccatgtgtccagagacagagtgcatcccttcacgtgggatgggctctcaaagtcccacacacacaccagggaaaaacgccagtccacttccagaggctccctggagtgcagtggcctccccattggcctccacgatcagggggctggatcagtcccgtacaggcctcccaaagagcgtctggggtcgatatgctttccctttttcaggccaactgtttctgtgggtttctccaacctggtacagaccccttcgatcttcattcctccctctcttcaactaggttccagatttcagctcagtgtatatctgtggatgtctgtctctgcttccatcagccactggatgagggctctaggatggcatagagagtagtcatcaatctcattctaggggaagggcttctaggctatcctctcctccactgcccggactgtcagatcgtgtcatccttgtaggtctctggagatctccctagttccagatctcttcttggacctatagtggctccctctgatatggtatctctcatcctgctctctctcctctattcttccccctactcaatatctctgctcctccatttcctctcctctactcttctttttgtgctcttattgtggcagctccctctcccctaccctcaagctcccaattagctccagagttcatgccacttcccattcctggggtctatttatcccttaagatcattcatgtttcctagtttctttggtgaagaggattataggctggtaaaccttttctctatgtctaaaaatcatatatgagtgagtacataccatgtttttctttttgtgattgggttacctcactcaggatggtttcttctagttccatccatttgcctgcgaatttcaagattccattgcttttttctgctgagtagtactccattgtataaatgtaccacattttctctttccattcttcagttgaggggcatctaggttgcttccaggttctggctattacaaacaatgctgctatgaacatggttgaacatatgtccttgttgtatgaacatgcatatttgggtatatacccaagagaggaatggctggatcttgaggtagattgattcccatttttctgagcaaccgccatactgatttccagaatggtcttaaagttcacactcccaccagcaatggaggagtgttccttcttctccgcatcctctccagcataggttgtcattggtatttttgattttagccattctgacaggtgtgaggtggtatctcagagttgttttgagttgcatttctctgatggccaaggattttgagcactttcttaagtgtctttcagccatttcagattcctctgttgagaattctctatttagttctgcaccccactttttaatttcattgtttggtgttttggtggctagcttcttgagctccttgtatattttggaaatcagccctctgtcagatgtggggttggtgaagatcttttcccattctgtgggtggtcattttgtcttactgactgtgccctttgccttacagaagcttctcaggaggtcccatttattgattgcagacctcagtgtctgtgctcctggcgtgatgttcaggaatcggtctcctgtgccaatttgttcaagggtaattcccactttctcttctagaagattcagtgtggctggatttatggagagatctttgatccatttgcatttaagtttcgtgcatggggacaggtatgaatcaatctgcaatcttctgcatgtctgaatccaattgtggcagcaccatttgttgaagatgctatcttttttccattatatagatttagcacctttgtcaaaaataaggtgttcataggtgcatgggttaatatctgggtcttcaattctattccattggtctatctgtctatttttgtgccaataccaagctgttttcagaactatggctctatagtagagcttgaagtcagggatggtgatgcctccagaagatcttttattgtaaagagttgttttggctatcctgggttttttatttttccatataaagttgagtattgttctttcaatgtctgtgaaaaactgtgttgggattttgatggggattgcgttgaatctgtagattgcttttggtaggattgccatttttactatgttaattctacctatccaagagcatgggagatctttccattttctggtatcttctttaatttctttctttaaagtctcaaagttcttattgtacaggtctttcacttttttggttagtgttacccccagatattttatgttgcttgtggatattgtgaaaggtgatgtttccatgatttctttctcattgaggttatcatctgtatacaatagggctacagattttttgagttaattttgtattctgctaccttgctgaaagtatttatcagctgtaggagtttcctggtagagtttttcgggtcacttatatagactatgatgtcatctgcaaatagtgaaagtttgacttcttcctttctaatttgtatccctttgatcccctgttcttgtcttattgctctagctagaacttcaagtacaatattgaagaggtatggagagagtggacagccttgtcttgttcctggttttagaggaaatgcttcgagtttctctccatttagtttgatgttggctattggtttggtgtatattgcgtttatcatgtttagatatgttcctgttattcctgttctctccaagatctttatcatgaagggatgttggattttgtcaaaggctttttcagcatctagtgagatgatcatgtggtttttctttttcagtttgtttatatggtggattacattgatggtttttcgtatgttgaaccatccttgcatccctgggatgaagcctacttgatcgtggtggatgatttttctgatatgttcttggattcgatttgccaatattttattgagtattttagcatcgatgttcatgagggatatcagtctgtagttctctttcttagtcttatctttgtgtggcttgggtatcaaagtgattgtagcctcgtagaaagagtttggcaatatcccatctgcttctattgtgcagaacagtttgaggagtactggtatcagctcttgtttgaatttctggtagaattctgcagtgaagccatctggccctgggctttttttggttgggaggcttttgatgactgcttctatttcattaggggttatgggtcgatttaaactgtttatctgatcttggtttaattttggtaagtgatatttatccagaaaactgtccatttccattagattttcgaattttgtggagtacaggttttcaaagtatgacctgaagattctctggatttccacagtgtccgttgttatatcccccttttcgtttctgattttgtttaattagcatgctctctctctgccttttggttagtttggctagaggtttgtctatgttgttgatcttctcaaaaaaaacaactctttgtttcattgattctttgtactgttttcctagtttctactttgttgatttcggctctcaggttgattatttcctggcatctactcctctttggtgagtttgcttctttttgctctagtgctttcagttgttctgtcaattctttaatgtgactttcctccagtttcttcatgtgggcacttagtgctatgaacttccctcttagcactgctttcagagtgtcccataagtttgggtatgttgtgtctgcattctcattagattctaggaagtctttaatttgttttttatttcttcctcaacccaattgggtgttattcattttccaagagtttgcaggttttctgccatttgtattgttgctgaattctagctttaatgcatggtggtctgataagatacagtgggttatttcaattcttttgtaactatggaggtttgctttgttgcctactatgtggtcaattttagagaaggtgccatgtggtgctgagaagaaggtatattcttttgagtttggatggaatgctctatagatatccgttaaccccagttgggtcataacttctttcagatcctttgtttctttgttaagtttctgtctggtggtcctgtctagtggcgtaaggggggtgttgaagtctcctactataagtgtgtgtggttttatgtgtggtttgagctttagtaatgtttctttcacaaatgtgggtgccttcgtatttggggcatagatgttcaggattgagatttcatcttgatggacttttcctgtgatgagtatgaaatgcccttcttcatctcttttgattgattttagtttaaagtccaatttgttagatattaggattgctacacaagcttgtttcttgagcccatttgattggaaaatcttttcccatccttttactctgaggtatcgcctgtctttgaagttgaggtgtgtttcttgtaaacagcagaaggatggattctgtcttcgtatccattctgttagcctatatctttttatgggtaagttaagaccattgacatttagggatattaatgtccattgttcgttggttcttgtttgttttggatttattgttggtggtgtcattgtgtgtggatttcaccctcctgcttctttttgtgtttggtaaaattagattatctattgcctgtgtttttgtgcatgtagttatgttcattgggttggagttttccttccagaaccttctgtagtgctggatttgtggatatgtattgtttaaatctgtttttgtcatggaatatcttgttttctccatctatagtgattgaaagttttgctgggtacagtagtctgggttgacatccatgctcccttagtgcttgtagggtatctatccaagaccttctggctttcagagtttccattgagaagtcgggtgtgattctgattggtttgcctttatatgttacttggcctttttcctttgctgctcttaatattttctctttattctgtagatttggtgttttgattattatgtgtcaggggggacttctttttgtggtccagtctgtttggtgtcctgtaagcttcttgtactttcataggcatatccttctgtaggttggggaagttttcttctatgattttgttgaatatgttttctgtacctttgagcagtgtttcttcaccttcttctatacctattattcttaggtttggtcttttcacggtgtcccatatttcctggatattttgtgttagggatttgttggacttgaggttttctttggttgatgaatgtatatcctctagcgagtcttcaatagttgaggttctctcttctgtctcttggattctattagttatactcacgtctttagttcctgatcctttatccagtctttccatttccagcatcgcctcattctgtgttttctttattgtgtctaattcagctttcatgctttgaactgtttcaagagcttccttcacttgtttggttgttttatcttgggtttctttagattctttaagagatttgtttatttcttgaattttttggtttgtcttttcctccatttcgtgtaatttttttgcttgctttttcttctatttctttaagggattttcttgtttcctctttgaaggtctctattatcttgctgagataatttttgatgtctatctcttcttcatgcactgtgttgggcttttcagatctttctggagtggagtccctagattctggtggtgtcatattggtctttctgttgttgagcgagttcttattctgtcttctttccatatctttttccagtgagtgcaggtggggtctctctatctcctcttgttacacagtagtgtgtgtgggccaggaattcaatgtccaaagctctggatggtctttcctctcctggtagtctcctcactctgacggagttaggcctccatagggatcgggtgtgtgggggtgggacagaaagtaagagtggggtgtttccaggctctgggtgttcctcactgcctgggcaggtttaccccaagcaggagcaggcctggggagatcggggtggatggggctttgaaagggagttgggtaaaagcagtgaatcactcacctccttgcgggatcagtcggcgggaagggaaggaagagtggcctgtacccagattcagggagctcctccctgcctgggagtgtctactccaagcatgcacaagcctggggagatctgggtgaatggtgctttggacaggagttgggtaaaagcagggggtcactcacctagttgctgatgggtcggcctatcttaattatttttacacttacttatttgaggtgtgtgtggtatacaatgccatagcttacatgtggacatcagagaactgcaggagttctttatctccttctaacatgtggatcctgaggcttaacctcaggcttcatagcaagtgcttttacctgctgagtcaccataccagccctgacatctttttcaatcatgtcaaagattccaatgagccttttcctctggtcccaaagcaaactctgggcttttaatccatttctgatagcaacatctggaagacttgggtcctagaatttgaaaatttgaaacagtaaggacaaaagtgaggaagaatcatgggaaattatctcccatgatttaatccctgaaaccacctggtgaagtgaaccaaaagacctccttgtgtatactgagaaaaactccacaattagacgtgggttcctaaggacagttggaaaacaactgtaaaggataaaatcctgctctacttgatccaaatgcatatgatggaagttttacaaggactgaggccatttctgtcctgctggaagcagattgcaggtggggaacttcacccagcagggtatgcatacacttagctttagcaacaaggcagttatctaagctcctgcatgtgctcaaaagaaaccgagatgcagagagctttagtcacttgccccatataagtgtgaccttggacccagttgtacccagcttttgcttcctctagtacttgagcttttttttttaataccacactgcatcatcctgcttctcaatgaaaacattaccttaaagtagtgcttgcaatatgccagtctgtgtattagatccatcttgcagatttatttgacacataggtgaatacatagctgaaactttcagttcaaaaaaaatgttcataaccagcttccttggagaagaaaaaaaaaacaggtgttggggtagtacattcccacactgaaataagtcattgtaatgaaatggaggatgcttatagaaatgctattgctctctactgtcccccttgtttcactctagagaccgtcttggacctactaacattggaatttgttactccttaccagaaagatatgaaaatgatgcaatgtttaatagctacagaatagcatgaatatgagttttcccaaactcagtcatggggtgtaaagtgttcttggcttctgtttttaaagtgatgctgattttgacctaaaaaatgatttctttctcctcctcttttgcagggaattttgtcagtcttattaatcatcaccatagcagagttaagcatctctgtgactattgcatccttaagaagctggtgctggaccaaatcaagagaggtgcgcccaaggttgtcatgggaattgagagagagagagagagagagagagagagagagagagacagagagagacagagagagacagacagagagacagagagacagagacagagagacagagagagacagagagagaacctgttcctgtgtgtgtgagaaagcaggtactctcataccacaatgtgaggtggaggtcagagagcaaccttagttattggtcctcagcttctactttgccttgagaaaatgtctctcctgctattcactactgcataccccaggccagcttgcctacaggtttccagcaatcctttatttcttgtctcttcccacactctccctctaatgctacaaatagcacagaggttggtactactgcattcacactgaggacatcactccacattgacctgacctctgttattgtgctgtgcagaagcaatatgctcagataccaaccacactgaaactcctaaattaggaaggtcagagagtcctgagcttaaaagactgatgctcactcgactctttaagataacttgctttctttgcttatctactgtcctcagttatctctgttcatacataattcttcatcttcctgaaaaacaaatgggaaatatgagactttgtagaaaacccatagtactgtgacattgggaacttatgcccttactgattgtttacaatgtcaaacattattatacttgctcggtgccaacttaataatgatgttaatactatatcaacacccttattctacttcaaaatgaacgaaggcttaacagagaggtcaattaacatattcagtatgacagaacacaggattctgactctgtggtgcaactcccagccttgtttctgagttacaacagcagtctagtctgtgctaggtagagtgtttgcttgcttccttgcttgcttttaactttaaacaatcaaatgcacccattcaaagtatgctgtgcaataagttttgacaaattttacacatccacttaagtgccattgcaatcaggatatggttcaatcctaccatcccaaaggctaatttggatttttcctgatggttagtgatgcacaggttagtagggatagatcttccttgaataagagctttttataggtccctgcctattccttaattaggtttttcatttgttattgttgttactgtattgtagtgttttcatatgtacagtttggtaatttcttattagacatatggtctacaaatatttcatcccaccctgtccactcagatttttattttacattctgaatagtattatcaatgcacaaaagtcatatttttatcaaatctaatttatttattcttctcttttgttatttacatgtttgaatatattgtgatgttgaatctttatattttttacatagcattgatttttaacaagtttaagccttgttataaatgaacatagagatagatctccatttgtctagttcttacaaatactttcagcaatactttgaggtttcagcatagaaatctttcatctccttagatagatatttttcttgaatatatcattcttttaaatgatagtataaattaacttcttcctcagaacctagtacctatttaaataataagattgtgctgggcaatttttatcattatctactcatatgttagtctgattttaattgtcaacactttcagttgaattctgattgcctttgatcatcagcattcagttcatctaaataattaacaaatcaaatagtagacttttgtttgtgaatattaactggatactttaagtgtcttagaaaatttagtattattcactacggaaaaaatcctgaggcaattttgatcaaatccctttgttcagtatctaggctataaggatagtgactaaaccaaatcagtgctaataaacaaacaggaaaggctggagagcttcatttcccttgtacttatatgtggacatgagagagaaaagataatatgagaatacagtaggaaaatgacataaagacaattctggcctattaacactctactttcccccttggtattataggctgtattcctctttccttcagaaattcctgaaaatactgaacggtctgtgtcagaagaaaataatcaattacaatttgagtttcaaaaaccatctcccagttctaattcaagttcaaacataagaaccattttcttggggggttatgctttcttcaagctaagagtctcaagaaatccttcagctgccaaaaatatcccacagaaaagtgataagggtacatcttctatgcatgctccaggtgaacaggaaactatttcttcaccctccctagaggaagagattaaactgaatgatttacctccccaattaaaacctgagtcttcaaaaaatatttcttctcagaaagagtctagaagcaataacataaatgatgaggacttagaatctaagttctctgatccgcaacccaaattgcttgacaaccaaaacgtgtcactccaagttcttaaaactccatcttcacataatgcactccctttgttacatgatagtttatcataccaaacattactggcaggtctgtcaacacaagccttacccacatctaaacccacatcatcccgtatgtcacaggcttatgatctgacatctgaagacttgccttctgagtacataccattccaagacagcacataccaagacatgcaatcccaagatacagcaactcaagacatatcatcccaatatacaccatacctatatacactaactgaagtaagactatcccaagagactccatccctagggacttcataccaagagctgtcattccaagatataccaactaaagacagatcatcccacgatactccatcccaaaagaccccatcccaagaaactccataccaagatacagtaactctagatatagtatctcaagagactgaatattcagacactctaccacgaatgcttgcccccccaaatactccatcccaggatatacaataccaagatgtactatctcaagacagaatatcccaaagcacacaaacccaaaatacagcacccaatgacatgtcattctcagatcttcaagcagtaaacagtcaagttcaaacccagcatggtcaagaaatattttataaggacattcgaacagaagtcatggagatgactcaagagtggcaatctagtaagagcaagaaaaactcaagaagactttccttatccttgctaggcaaacctagacaattccatcccaagagacattccctggacctgcagcaaatccaaggttacaaacccacaaagaagaattctgtagaattacaaaggaaaacttcaagaaggaaatccacagatcagcaaatcaaatcctggctatccccaaagaagcataccacagagaaacaaaatgcatatactcaaacctcagagcaattcctacaccaggaagctgatcagcagcaggccaaagaggaggaggtcccagtacaacgatccaaagataagcaagccaaagaccaaaaatctgtagaggagctataccctgaaggacatattaatggcaaagaggaagaagatcaggaatctgataaggagcaacgtccagaagaacaagctcaaattcaaccagctgaagaccagcagatgcaagagcagaaagccccagagagccagttcccaaattcgcaagaaagacaacaaatgctattaaagagagccccaacacagccatgtgagaactgggactcacaaaactttcaattcacagaaaagtcatcttcatacttgtcaaatccatcctggcagcctgctagcctgggatcccaagaccggagaagtcaaggctggagaaacaaagattggaaagtacaagaatggcagtttgaaatacagcctggcctagactgggaatcccaagagctattagagagagaatctttaaggcaaggagcactacaccaagacatccaaccccgaagcaccatagtccaacatacccaagatcatcagtttcctaactttgtatttcaagtaggtctgtgccaatacaatgaccaacaagactctgaatctggtgttttaagaagagatacatatgcagatgatgtacaaacaagagacagagaacccagagacacagaagatacattccagaaaccaaaagaccagaaggcagaagatgaaaggccagatagttatcctgcttcttgtcagagcttggttccatacacatatgtaacctatttatccaatgtagcatcagagcaagagaggcagaacaatacaaccccctgttcaaattcatccaaagatctggatgacacttcttcctcattgtttcagaaagatcaacagcagtctgaagattcagactaacatgcacgtttaatcaaaaaccacagaccccagatagtggagccagatgaggattaagcagttggttcttcactacctgtgttctcaactgtgcttgctgcataattcactcaccagagataaagggcatgcagaaccttcaaagaatgtgttcctctttaaaacataatggcaacaagtcaatgttaagaatatatcacaaccttctgggagtgaagaaataaatctcatctaaactgtaaagtttttgtcatcagttttagtatttcaaagtatggtggtcaattcatctcacagcttcctacttaacggatctattttcccacaatgctaatattttccccacatttgtgttgaagctgtgtaaattaggtttgtccaatgcttggtgaaataggaagcagagctagagacagaagagaagaagtcagggaagggtggccatgtgcatagtataatagaaaatatggtaatgtggactgtattgaaagaagctccagctctctctctcacatgcctgcactcacagctttgtcaatattaggagccaatttcactttctgtggccaaatgaattgtgttacaaactctcagttaccctctgtcttcaaagtcagccacagttctctaatcttctttgatgtctttgataaaatcttgcttttctgtcagctctgaagctttgcattttactcagctgcatgatcttctctctctctctctctctctctctctctctctctctctctctctctctctctctgtgtgtgtgtgtgtgtgtgtgtgtgtgtgtgtgtgtatgtgtgtatacctgaatttcctaatctgtaaatatagaagcctcaaaaacatacataaaaatagatagtaaatgtaaaggataattttgaagcatataatgttggatatcaggtgcttttcatgtagtctaacaagcttcctgagatacattttctaccttaaagttggggcctggggcctgcagccagttaagtccagttatagtatagaaacaatgagggtgggtggaagtgtgttcttacaataagtaggattgtctgacatagtagctccttcaggagaggccatcatagtcttttcaggcaagggaatattctcatagatagccaggccccacttgagacagagggacctcctcccctgaatatagtagactcatcagaattccaggctcaatgttttcagatttgcaaagtcttaccatagatagccatttcaactttagaatcccatttgtgcttaccaatgtccccactttaatagcagtgtccctgaagaacagagaattcatcttgcattgtgttccagacagttgctaaatgagattctgcactgagtttttggcaacgttaactctgtagctatgggtgagaagaggatccttcaggacacacagctgtgggtcatgtatatgatgcttgatctaggaactcaaatccctgaactcttccctctctttccctactttgcccagaaaaaaaaagtggcagcaatcaacttcattatatttacatactctgaaaagcattttcaagtatcatgagcagtgtcacccagagtcttgtatataaatgcttaattaggagcagtaggtggggaaattttgtagaattctaaagcccagtcatgccgtagactaacatgactgaaaagagactacttagcttctttatagatgatgaaactgcagagcttattttgaaactccagaaaaaatatctgtaagagttatgctttttttaaatagcaaacatcatgaaaggaaagtgaaacaataagtctttccgccaagctgactgagttccgcctactgtgttagggccccaaataacacacagagacttatattagctacaatgcttctggccaatgattagaatttcttatatacttgctctgtcttaagtatcaaccatagccataatctatatatttataaagacttatctgatggaggacattggcagcatgcatcctctcttgtcgggctcacatggcagctccagagaagagaggaggaggaagagaatgatttcctgcttgtctctgcttatattctgagtctgcctgctatgtcacttcctgcctggatcacaagactttactacatttcccagaatcctccttgactcctagtacctcctaacttgctgcctcattggctgaacagtgctttattcaacaaccaataagatacacagaaggacgtctcccatcaaggaggttattctgttccacagaaacttttttagaccaaaaattgtatgtcatagatgtctgcctggacaaatcattattacatggatggatggctagatagatgatagatgaatgatagacaaatagatgataaatgttgctttataatattaatcaaattatctctttgctttgcactgaaatagcctgcctctaaattctgatgcagaagtcataactcctaatatgataatattggaaatagagcttttgaagatactaggttccaattaaaatagaagagtgtgaccctcgtggtgggagtagtaccctcctacagtggcacatgcatatacttctagcactcaagaatatgaagaagaattgggagttcaaagccagcctgggctagtgaacttgaagccaactttgactacactgtggaactcttttaccacacagagagggagcggaggaagggtttgaggagacagagaaagagacaaacacagagagacaaagagacagaggcagagatgaggagggtaagggaggggtaaagcgggagagagacttacctaaagacaccagagagctgaggaaatgtcatataaaggcatcggaagaaatcagccacctgaaagccaagaagagagccatcataaaaacctaagtttgtaggtataagaacaattgtttatagattgttgttagggatatgctggtttaataaattacgggttctagattatccttcaataaccatgatttcaccagcctgaaaactaggtttctagtaccaggcatggtttctctcctgctgaatggctctttagtataattagagagcttttgttttccaccaagatttgtgtggcactgttattacacccttgggttattgtgccatgctggttgatgtggttgattggcatcatggctgggtaggactattggttgtctccttcttttggatgcttgcctggtgcattctgaccatgaaagctagtcctcagagaggggacattcagttacattttacaagtcagttacattttacagacaagtgtagtctttactcacttcaaggaagcttctctttacaacagccagagcccactacagaaaaacatatgactcaaagtgtagacttgtggagcacagtagtagtggaaatatatacaaaccaaaatcacacttaaggctcaggaaacactgagtgggtggagtgggtggagagattttaagagtgacattaatcatggagtttgctgtaaggttgtgtcttgtagtaacatgacaacatgatttcccaaacatgaactgaatgaggatgacaccaaatgtgattgcacactgatgaggaaaagtccatgatccctcatccctatgcaaagaactacaggcaactgagaaaagctgggcgcgggagaagttctttcccagagaagggcacaccaaatggttgtccagtaacaaatagttagtatggtaacatgcatacaaataacattctaaagactgaacaggttatatttagaaatatatatgtatatattcttaattagtgaaaaaagtggccatgaatttgaaggagtgcaagtaggagtatatgggagagactgggggaaacaaagggaagggagatatgttgtaattatattaatcttaaaaaaataaaaatctaagtttgctggcatccagattaaatagtttctattttttagaatcataaataaaattgtttaaattcccccaatctcaggtacttggtcatggcagcccaaacataataacacaaaccttttatatttttttcttagatagtagaaaaagcaagggcattaaaaaatcatcttacctcatgaatcaaatatcactttgtctttgacagaaaaatccttgggagtcaaaaaggaacactagctagagagaggtcatatggacacactgatacatgagtggatacaaattacaaagtatatatcaaaagatacatccagtgggaattccctaaccttgtgggttctatagaaatgtttgcaatttttattttaaaataatctatacattttgaaatgctctgttatacttgaagttaataaagattcagtacaatggcaacacaatgagaaagagtcatcatccataaaagccaagacaacagcccaggacaattcagcaaaacagaaaccccagttgctttcttcatctcttgtctccttgttagtctccaaaataactgaaaacactggaagaaacaatggatttttcacagtccttcatgggataaggtctagagtcagtgtttataatttaaagagcaaatgacacccagagaggacttggagaccccccaggcagaagataactgtcactgtcttgctctctactgctggatatgtgtctttggaaggagggcattttttcatcagaaagacaagaaatctcaaaacaaagaaaaatatgatataaataaaaagactcaggggcctttcttacaaccccccagcaagggaaatcagagaagaagccttgaactcagtctgaccacttgcatcatcacagcttcccaaaagtatggtagtttgaatgtaattgtccccctcgtagagagtggcattattagtataatcaagaaatatacacaacatatatatacatgtacatatacatacatatatatcccacagtgtggtacagttaagagtactctttacaggggacccatattgggcagctcaaaattgcctctagatctagctccaggaaatgtgaaataatgaagggcattattgacctcttctgacctccacagacgcttgcacacaagtaccaaacacaaagacacacatggatgggcacacacacacacacacacacacacacacacacacacacacacacacacacacttaaaaaataaacaaattctttcttttgcttatttatgtccttgcaatttgacaggccagattcactaatgaagtagtctaattctgtatcacttgggtctaaactgcctacagaatttgcctaggctaatgagaaactagcaaatgactcagcatgagtctgaagggcattattgtcctgaaaaaaaaaaaagacagaacaaaactctgcatctattggatgtgtgactgaggccatcctcactggtctaactctacccaatccactagtgggtatgagaaaacttggcagggattggtagaacagtaccagccaggaaaagcaacaatgtaaatggtagtgtccacaaaatacaaatgtaattctttgaagccactatgctttggggtggtttataacataaagctactaaaatgaggtggcaaaaaataactttcaagtgacaggcaacatggataaggtaagagctttttaaaaaatttgactaattagttctaaggcctgaaaggttttgtcctccctacatctgaaatgaaaaaactggaaatttgggaactaaaagatttcacagattaaaatacatatgagaaagttctaagaacagaggactatgtgacttgcccaagaacacagtgctttctgacaaaatcaagaccactagtcagcttctccaattcaatacacagatgtgggcactttaacttatatctttgagctcttgaccattcctgagattctatgactctgtgactgtatggttctataattctaagccaaagtacaacaatgccagtgctctagatagcctcagtacagggaacaaacatggtctaaatgggaatatcgtctacattcttttcttccacttgaaaagaccaactataccatcatggattcaaacaacatgcacagtcctgtgctcctggtatttcctccaggggtcaccagttcagaataccgaacaacagagcttacagccacagcctatgactcccaaaaccgagtgcagaaagtccttattagaaaattgaagatcttgggggtaagtaaaatgtgtccctctgtgtactctacccagggtgggtaagaaactctctgctggcacacattctccaatgggaacgaactccaactcccatctccactcatttcagggagtatggattgtgcttctatataaattacgcatgaaattctgccagcaggaaaatgcaagataaataaattcagcgttcctggactcttaaaaaccacagcctccaagctaaccatctttgaaatttttcttgtcaatttcagagagaaaatggaaaaatgacaatcaagtagaagttaggccagattccctagtttagcatactgcaacatatatttttatacctgcccaacaaaagctcaggactcacagttttatacaacagtctcatgtatgtttatttatgcataccagtatatggatttttagaatagcctctttttattttttaaattaaaaatataagtacataatctcccatcatcctagtttcaccgttccctcttagaactctggtctccttttgattgttacatatatgtataaatacacaaatccataaatacaatctgctggttctgatagtgctgctgaccacttgtacatgaatcatcaattcacagggtggtgtggagtctttaaaagactacttctctctttctccgaagtccttagttgcccctaattctttgtctagtggtggggtcctggcaaacattcatttctctatcagtcaactgattcactctacaaatactaattttatttaccaaactttcttaagataatgggcaggtgagaggtagtcacgtacatttgaggttgtaatgtaacccgcttctttgagaatatttcatcatttgaactccagcctcctataatggaatatagaaagtaatctttttttcagaaaaaaaaataaacagatataagaaagttcatcctgtggcacctggaagactgctaatgtaatctgcttcagcatctcctcaaagacaatggagtccaatcttgaatgagatagtttataataagttaacagaaatacaactcggtgcaagcaactatgttagtttctgtagtcacagaaataaatacaaactagttcttcctcactgaggaaaataaaggtgtcattcgaatgtaataatagcatgaaaatattgagaattatgtttcaatggagtgtctaatgagagcataaatggtaacagtaaccgtggaagccccagagttggagcagttatttcctattaaaagggtacaagtacatttcacaatgaattggacattgaatccagactctggcaaaaggatggaatttcaacaaatgtgaatgaaagggaaaaacagaatcatactagatgcagaaagctctggtaggtgaagcatgggaagcatgggggtggtagaggagagctgggaggggtcaatctcggcttaaggtatttaagaagactaaaaaagaatcaacccgcctggtaagtttagtcatgttatacccatgcagtagaagagtgttctgggtacaagaaatgagctaacatgccaaaaggaagcataaagaatctcattttcatattgctaagtgaaagaagccagtgagtgctctgggtgatgacagacaatggaggaatatctctgcatgcccgccaacacgtgggaaaaaacataaaagttaggaattaagcacctcagtattgtctacaacaggaaaatgggataaaaagcaaatatgcatgtttttgtaattcctctgtcagattgttatttatattttttatatgtgtttgtttgtgtacatatatgatcataagcatgccacagcacatatgtggaagtcagaggaaaactttcaggagtccactctctccttccaccatctaggctccagggatggagcttagcttgttaggcttggggtcaggcacctttacctgctgggccatctttctggctgaagtatgcatgatttcacaagtagagataataggaaagttagctgctttggcattgttgcaatcagggaacttgaaaagcacaggtgacctgatgatcccaggcctaaaacgatgacagcatcgacaacagagacaaagaagtcagaagatcaggtttaaagggagaaagtgagaccattttaggacatatggattgagttggtagtaggatattcaagatggatagtcgaccagatgtgatgaaaatatgtacataccccttagtattcagccactaaatgttggttctgttgtgaaagagctcacccagactgaggaagtatagtgaaaaatcagagaggccatgacccctggggcatatgccttctgttctttttgttattctcaccaggcttctctagcaccattgactccctgcctaactttaatagtgtgtggaaaatgtgtcttacaagcatagggcagggagaataaagaacaagccatgaggaatgctccaggcctagagatgccaccctgcttcagaaggttcagaggaacattcacctccaagaggattttcctgagtgtccctttgagaccaggccgcttcggtaatctaaattcaacattcacgtgtatgtgctgaagagctggagagtttagtgagacgagaatagggcctgagagcttccactcatagcaccagctggtcttgagcttggggacagtgggttagactcattctcctctgagcaattatcagatggaggaatcaagaaagcattaaggaatgttgtaaaaggacatccgttattttcccgtaaagagggtacctgccaaatccttgaactaaagatttgagtagaatgggccccaccccatgtttcttctgagctcacttccccctctgtttgcagaccacccagatcctgcttggaatcatgcacttttcgtttggagttgttttccttttcaccttggtaaacccatacccaaggtttccttttatatttatctcgggatatccattctggggctctgctttggtgagtatagtgcatttagttcaatttcaaagcatgtcaacgaagcaaggagttagtggatgaattcttacataaaacaagacaaatttgggtatatggttctgtagaaaatgccacaaagatattaacccctttgcaattacttctatcctccattgaatcaccagaattgatggtagctcatctttgagtcatgaaatttggagggaatattcctttgggctttgtggttgtttattggtccattaattcataaaaattacttgcaatatatgataaactgtattcactgagcaagacaatgtggatccaatttcagtgattatcctccaatggacattcagtctaataagaaagaaaccatgctaagagatcagcatacttcttatacctatatgaggttgcttctgatgctaataagcaagcagttttctctgcagaaagtgaagaagcagagacagggtgtgccttctgagctacatagagatgctgatttaatcacatcatgtggtccacattaacttagcatcataagagagtgggtagggtgagggattcagtagagggcagtctctggtcacaagtcctcataccatagggtatgacaagtattttgcagaggacatagaggctgcttccatagaagtatctaagtataaagggaactatccagagtcatttctagctggactagggcttagaggatgaagggttgtttaattagatgtaaagctcatataaaggatgggaacaggggctatccgggtaaaaagagagggagtttcattgtctgtctgatggcctgggagagcatctgctattaagggagctggaagaagaggctaacattttaaatatagctgggccaaactcagactttaagtttctactaggcaatggggctgccatatttgacccacctcgataaaaattaatgtgtgtggtttcttccttccttcctccctctcttccttcctcacaccctcccttcttccctccctcctcccctctctttcctattaccagtctgttggctggtgttcccatccaacagaacatactggttgggctatagtgctatatgactttagtgttcctaaactgatgacattagtgtcagttgggagctgagtcgttatatcaataacaggaaaatggataaggaaatgaaagaccagtaaggtagaaacagcctcttcttcaaacaggtggctcagactaaagcagatccatcctttttgtcctctgttctgtggacagtggtgtgaggtggctcaccctcctcactcccctgggatttctgtgaccttaggagggaggcataggaaagaaatgggcagagatctgacctgaaaaacactccacatcagcttaccatgtccatcatgaagattgtttgtttgtttgtagttcattaactctggagcttttctgattgcactgaaaagaaaaactacagactctctggtgagttctatttctaccttataaaattataattgcttagtaatttgaaaatcaccatagaatcagaagccattagttatcaggagacgtttccaggttatcatgtttgagtctcgtgttctacatgaagacacaggcacagaatagttcaaagactcatccatagcctcaggtcattaatgcagattgggtctcagtaatccagccattcagtcattcattctttccataagtagttttgatacctacctagtccataccagatgctttaacaggccatagtttgactcactggaagagcacaatgtagacaacctaatgaaatcatgaaagaccctagagttaaagaatacattgctggtctatgtaaatttgtagacatattatatctcactcaaagaaagaaagatattagatagagattaataagtcagtatgtgattttaatcaaagaacaccctaaaattctgtaatttaaaaatatgtttacttttatttattgggtatgtaaaaaggggtggggtaggggaggggtgcattccatgtcacagtgtacctgtggcaatcacagagaacctatggaagttacactgtacccatggaagtcacactgtacccatggaagtcacactgtacccatgacagtcacagtgtaaccctggaagtcacagtgtacctgttgcaatcatggtgtacctgtgtaagtcacctgtacctgtggcagtcaaagtgtacccatggaagtcacagtgtacctgtggaagttagaagatggcttgtaggagttggttttctcctacacccctgggtctcagggatggaactcaagttgtcaggtggtaagtgcctttatctgatgagtcatctcaccagccctaaaagtttgtaattttagtaagatgaaaaagtgacagaaaaatgcaatgtttggttaaacatagtctttaaatgaacatttaaatggccatagctctgtttgaatggaagttaacccaagcaccaaatgtgagatatggagaggttatcaaaggttggttgacttctctcactgtaggtgaatgcctgaaggtgtgtcataaattgtaaatgttttaaattaccacatggtgttttcttggtgttgtgactaatccagctctccaatacttacccacccctactgttctgtctgtggtgcaaggtaggcctgagtcttgtattatgttttgattctattgcagataaaattgagccaggtgatgaatttacttagtgccctgggagcagcagctggaatcattctcctcatatttggtttccttctagatggagaattcctctgtggctattctccagatggtattcagtgtggtgctgttacctttctattcattgtaagtaccctgtgccatttctagagtgcgaagcagatggcttaaataaaaaggttaacaccccagtcagcaccatctggatagtattgtggatgtatgtgtatttccttttgctcaaaacagtcaagagtccattgtactagaccagcactctatcaggtattgtggagtagaacaataaacactcaataacttataaaaggtataaaacatgcaagaaaaataaggatactataaatagaaaattatgctaaaagatagtggcatagcggtatgcttgtggttcaaagttcccaatatacattataactgtgaatgcctatgggttttatttagttttaatatttagattatactatatttagattctgataaagtatggtaaactgaaaatagacttttctgctctgtccaaaatacaacaataattggtgtaaaataatgtaaaaggaacggatggatctatacagaaataaattgatagtcaagtaggcatagtaaagacgactaatgtgactaacttcatggtagagtgcatgcttagtcaagatgaggcaatagtttggatcacaatgctccccccaaaaaaattgctgaagaagttcaaaactacctaagagaatggagttcaagtaaaagagagctgttctaagatagcatgtagtgtgattaggtacaataggaccccccaatatcagggatggggcagaaagagggaactagtcctgatcatgctgagcagaacttttcagagcagcccttctctgaaaacaaagaactacaaataaaacaaaacccactcaaagacatttaaaaaccttaaaagtctgctatttacaaactagaaatgtgtaaaagaaaagcttaggattggaatttctaaatggaatgttagagaacacagacactgcttatgtgtcacagctgtgtgtcagtgttggccttctgaaatctatgagagagatggagggccactgtccactcaaggtagctctacagtgacctgggccctcaataggtaaggacaagacaaagtgtcctgtcttaaagtggtacagagggctgactgaacaaagtaaataaaagaaaaaagtattcaagaaactgtggccacaaacctaacttctgacttcttcccactcctcagtcccatccccacaccctgagatttcaaccttcaatagacatcaactgtgtgatccaagaatgctcacaacttgaactggatcttgctaaggctaaaggatatatggggacaaatgaccagtaccttccagaagcccctataactttttccaactcaaactgaaaacatgtataaaaagaaatgactctatggatgacagctaataggaacaagatagactaagctcctttgccaataatccaatataatctaatcgtcattctttgtgattttcagcaagaggatatatatttgtatataacatatagaaatgttcatatatatgtgtgtgtgtgtgtgtgtgtgtgtgtgtgtgtgtgtgtgtgtgtctgtgtgtgtctgtgtgtgtctgtgtgtgtgtgtgtgtgtgtgtgtgtgtgtgtgtgtattcagagaagatgtatactggaggatcagtggatcttaccaaagccatcactcactgccactggtacacctcacatagtctcaaacaatagtccttaagaaatcccaaaatagatattccacaagatacaacagctcataggtatctcaaactccttgggattagcagctatatcttttctattcaagactattggagcaaaagagccctccttaaatggagggccagttgccattaattgttcaaggctcaagttaactgagagacaaccttactaacataacattactgtgacagtgtctggtagttctgtaaggctgaaattaaccagacccaaacaccaaaaaatgcatgaaaataactaaagacctacatttcttataaatacagatataaaatccccagttaaatacaagcacactgaatctagtgatgtgtacacaggatcaccaacgacgggtatcccgtgtcccaagaatggaatgcatgtttaaggaaatctatgtatttactataccatatcagcaaaacacaagatgaaaaccacatgacatttgagtggacatagaacacatttgacaaaattcatcactaaatgataagaacactcaacaagccatgaatacaggaagaacttcctcagtttgattaaatccatccataaaattcctcaacttgctttctccctatcaaaagtctggtattcagtacccatcaatcagaagctcccagggggcagtcaaggattaatgagcaagtaggatggcaagcagagcaaggagacaacatccatttacatagaaggcacacatggctttcaatccaatatctatctctactgcaattaaatcacctgtatataaacatgtattacaagaacactgctgtagcattcttcatggtaaaacaaataacaaaaaaagaacaaaacacaggaaaaaaaagaaggaaataaatcagctcctgtcacataaaagtattgaaatactctacaccatgacatactagatcactgttaaaaataaaaggtgatcttaattagttattcaacctatcataaagatacaacagacaagtttagcatagaacagactgttaatcacatgaacctttgcaatggcaatagaaggatccactcttgcaagagggcaggcttcaaccagatctgtgccagggtccaactgtggactcctggccaggtgtgtatggctatgtgtgctcttagctggcatggtgcaatctactttaaaaatcttctgtagcaattagaaaggactgggcagttcttttaacctagctttatctccatgtctcttttctctatgttactctttttctggaatagtagttttctcttttccttgccttttctattttcgtctctaccattttcctatctcttggctttcttctatctttgtccttcaagagaccacttctcagatatgcattcctctgtggattctgtgtttatgaaatggagagtttcctgcatataatttagcaaatattctgtttgatttttttttaaaagaaaataatgttatcctatgctttgctggtaaggcttatattcccattatccttccctaatttgagaggtaagggtttattattggtaatggctacttcattgtgatcagaaaacccatcactatcccaaaaatgtgacctcattgtttctttctgttgcaggggattttgattatgctgatgatcttcagcattgctgaactgttcatttccctcttttcctcgattttgggatactcctcagaacattttgggatatgctgttgttgaataacactgtgcaataaagatgcaaaatgatacaacttagaggccagtactgcttggataaagagccaacacacatatgtacttaaaactcacaatcatttgaagcaaaaggggttgggatcgttttgtctgatgtagccatcctgccccctggtaatgccacttcctctcccaacagaatgatcaccttggtgtaatcacccctcttgttcattgtggcatggccactctgtaagtaaagataggaaccaaagctcaaactcaggtcatctgacttccttactcatgacagcttcttgatgagtcccttgagagatgccacagaagggctcctgtcccatgaatcaggaagatacattgaaaggaagaatgggttggtcatcagattttaccttgaaaccacaagactgtcaattgttatgagccagacatctacaagagtaactgcagcatgctcattcatttttatttttagcttgacactaactaaagttacccaggaagagaaatggtcaatggagtatcgcccatataaaaatgacctgtgctcatctttggggcactatgatgcttgatgtggcagggtccatgccattgtgggtggtgacacttcccagtaggtggagggagttgtatcaaaaagccagcagggtgatgggtaagagagtagagtaagccgcactccttcgtggattcatgctttgagtctcagacctgacttccctcagtgacagactgtgatctgaaagtataaaccaaatataatctctttcctttggctatactatttaccatagcaacagagaagcaaactagaatactcaaatcaataatcagtaatggcaaatattggtggagatactatgtcccagactgtgaccaatggtatagctgctgctcatttgacctcaccaaatactgaggaaaatgttattcttatatccaaacaaggaagctgaagcatgagaagggtaagacttgctcaaggccacaaagctctcagtggtaggtccacaccaacacacagtctgggtccatagcccaagaggtctcactccttatacaccagcatctatctcttaagatcttgttgggtctctgaacgccttttcacctttcaaaattaagagccattacatactgacagaaataatgttttccccaaacaactatattttacaaagtagtgtggagaatagcactggttttattttcaaaacccctaaagaaacagttaacagcctggactatccattcatatcatctgaggaacttccataatccccagtgcaccataagtaaatacatataaatgacatgagagtgtggtaggagccacgtatttgatcggttttcagagacttatgggggattccaatgcagagaatgtctggaagggactgttttaagacagcacagtgtatgtggtgcagggaggggggtcaactagatactctatatgacccttccctgcaggccatcatggctcagactctgctgcctgtggaatgtgccagtatgatctagtgaaagagctaaataagatcttaatgtgggactgggaagatggctcaaattaagagtattccctgctctcctatccagggaatccacactggacaaagcacaactgcctgtaactcctgttctagggtttcttacaccctcttctggctcccacggtacctacatgcttgtggtgcacaaacaaccatacatacattcacacacacacacacacacacacacacacacacacacacacacacacacacgcatgcacgcacgcactcacgcctacaaataaataaaacataaaactttttaaggtcctcttgtcgttttgaaaacatgtttgaactcatggatcccaaaaaggatcttgaggatgccagaagatttctgatcctcactctgagaatctcagcattgtaatgcattgccctgaacttactgggtatcactagcattgacacacttcctatgtcatttcaactgccatgactgcccattaaggaaggtgtgccttcagtcacagatgtgaaagtgaaactcaaagcagccaacttttctgagagcacaaagggcatctcatttaaaaaaacaaacaaacaaaaataccagggcttgtttttttattcctaactgcaaatctcatattccatgcggccttgggcataggaagaattgcagcctggtccaatgaatgaactaacaagctttcttggatttctgctctaagctagaaggagccaatgtgtgttctaagctgggaggtgaatgtataaagcgagaggcagaagtttgtattttccatggactgagggtctggtgaaagaatatttggtaactgaatgagtgatgttcaggcttttgaagtgtctaaaggtgaaaacctgacacctaatggtaagttagactaattattagatgccattttatcatgcacaagtcatgtgactttggagtatttaaacactatgagctttaaattccaaggctcaaactcagtaacacctacctgatgctttgctgagaacctccagcgcttggaatttttaagtcactgggtaaatggtgtaggggcttataattaggatttttcttgcttttaaagcattgtttttattaatttctagcagtgtgttgggaagccagtttctccattttctgagccataaaacaattagttgacactgcgtgtgtatatgaagggacacttgatgagtgtcactttcctattaaaagtgtgaaatcttccttagaacacgaagaactataaaaatgttatgtacttgtgcttacattatgagtataacattgggatcatcaggcttgtagccacatttgatttcattccaacactgaggctcacttctgaggaaccagcttctcccttaacaatgccctgaaacaaaatccctctgaaggcaaataattgtgggtgccagggctttgctgagcagctgacagcatgccatcactttagttcctaattctgagaaagcctgctggctctcaccttcaggggagaaaaagccaaagagagcccttaggtcctgtaacattgacgaaagcgcgtgactcagaaaagcccagccctgcttttaaaggacatggggaccaaaggcagagtaaggaaaggacacaaataatcatgatgtagaatgcagtcttcagaagagggaaacgcggtgccaagaggagggggattgagaatataggtggatctgcaaatgctaactgagtaagagctattattctttgtgcacactgtcagatagtcttcaagactgggagcacagggtaatgacaaggggatgcttcaaaggaaaattgttaagcgcataatagcatcaacaaaatgtcaaacacaaaacaagagaaagtggagaatcaaaagcagtgcagttgacaagacctaattctggtgggcatttgagcacactcagcccaaatcagccacaacaacataagctgatgctataaactgaatttgaatcggttttggaggtcatctcattggctagaaatacaagaagaacaagcatcccaagatgaggaaaatgggacttagaaatagataccaaagttgggctgtacatctctgcctggcttagactctcaatggccatacatttacaaggccttaccctggtcccacatgcaatgcagtgaaaggtatgtatccctaacccacccaccgtgcccagacaggagcttcaggtcttacagtcatctatagcctgggcccggagagctctggtttgaatacattcctaaagatcttaggtttagaaaagctaactcccattgtgaccgtgatgagaagtgggcctcaagtggcaactggtcatgagggctcctcctttataaatgctaaccctgtcaccatgggaactagctagtacccatccccaattccctcgatgaatatgtgttctcttgcccttatgcctttcttcctgggatattagagcacaaaagccctgtcatatgtgggacccttgaacttgaacttgccagactactaaattgtaataattctttgttatttatacatttgtaaaaagtcgttaatattttactggggaagcacgaaacatactaagatgttatgtcattatagccaaccattgtcccattacaatggatacacaacctaatgcttggggacccgccattttcactccagtcctcactacagcatttctgacacatgattgaaaggctgtcacctgggttttctgaatggcagtgtgctctctacccaaatagcagcttgtcccactaataaactactcagcaatgggaaggtaacacttttgtttatgctcccccaaaaccagcctccccagaaatacttctactcagtggtcctaattatatgtctctaaagcaacttaaatgaaatagagaggggaaaaagagaagcaagagagaggtaaaatagtctcagattagttaatataattacttcatttcaaccctttagactaaatgggcaaaggtatatatctacagctctgtgtctctaacgaaacaaagcaattgacaatagaattaaaaattaataaaaagcccaacatatgatcatagaggttgtatatggagtaggggaaaataatatccttgagaaaaatcttatgtctttattcacctctgaaatgtttagacttcctccacttacctacttgatctggcgctgaacttggccatacagttccaggcaatactgcagagagagggcagcaggaaggggtggggagaagagtgggctcttatgtaaatgtgtcgtttcaattcatagcacccaaaatggagcttgcctcacacttctgggtgtaccttctatagagaacaaactatatttcatgccatttctgctaaatttgacacaagatttacatagtgcgctagaactgtgtatgagcaaatgacagtactgtttgaaaaccaacaagtacaacacttccaagcgtacctgctgggggactctgagtctttgcatgggtgcctccccgacctgctcaaccctaaaagcgaagcataaaggtaaagtcagtccctagcagcctatctctggagattttctagcatcctcctagcccgtagggacccaccatccacacctgcttacagggtgggggctgcagaacttcttctaattaaggtagcatgaagcacaccagacagtccccaagggtatttttcaagaagtgaaacctcccagtaaggcagaaacttttttgtatatcctctctatcaaagcaaagtgattggatcaaatctcaaggtagcagaagctgttaatttcctgtcacctggtgtcaatcagaggtaccagccccaggcctggtctatctcacttatcttcaagtacttgaaataggagacgtggccagctgatctcagcagtgtcgatccttgaagtcttggaggcccaggtaaggaatgagttttctctgtttaaatgactaaaaagagaggctggacaaggagaggagtggttttagagactagagagtctttcagactggggtgtccttggtgagactttcaaatgacagcatgatttaagctgtaatggtttcaagggtggatgtgccagcctcctcctagggcaatgggtggtgagcagatgccagcatggagataaagtctttagcatgttggggtcaacctaggtctttactacatagaagccaaataaccctgggtgagttgcaaaacttctccatgcctcaatttccttatccataaaatgggagcaatagcaagaccctctgcatcatgaagattaaacctaaaacacagactccttaaggagaccaaattagaaaaataaccctggccataagaatctaactccattcctcctgtttcagctgatttttgtctccaaagatgaatttcaatgtaaacaagcatagatatagagagcatgttctgcatggcactggcacactgagcccacaatcttccttctatgtatcatctaagaagccaagggtgaaagtgggcactggatataggctagagggattgattttaaccaggttctaatgtgttcctgaaattaaaccataaagtggggggggagtatgggagggggaggaggagagggggaaggagaaagggaaagggagagtgcgagaaagagaaaaggagtgaaagagggagggagggagggagagagggagggagggagagatggagagatggagagagggagggagggagggactgtccctgtttccctataatggtttggtctcattgatgctcaggtgaatggaggtcactatcgtgtgagtagacagcaccctgagcatttatctgtaaccctggagaggaggaggctgagtttgatgctctgtttaacatttagtgagctcacagcatcacaggaggcaggttccctgcacattcctgcgcagttccctttggggattgacactgtgttccaggagttacatgtcacactaaaatgaaagtggctggtggaaaagtaataaacatgaacagctgtggacttgaaagaagttcttaacatcaggcaaggaatggcctgaggtaacacaaacaacattttgtggaggttgacagaacggggagagagcagggggaaagactagctcagagttttttcagattcaacaaaggaggcaaaagacatgtccaaccttgactgctgaggatatgggttctgaaagccatccagagtggggctgtaatgaggagtcagatgtgtgtttcaagcaaagaaagtgagttagagatagtgagatagatcggggagagctgaggcccaggaagagcacaacttagcagtgatttaggggatgtgtctcagttgctttatggggggggtggcatattagaaaaattattgaaggaaaacaatagccacaatgtttctaacatttctgacatttatttatttggtgtgtgtgtgtgtgtgtgtgtgtgtgtgtgtgtgtgtgtgtgtgtgtgtgtgtgtgtgtgtgtcacatgtgtgtggcagtcagaggacaaccacaggagttagttctctcctcctaccatatgaaccctggggatggagctaggttatcagccctgacaataagccagataactggcctgatccctaagatggttttttttcttgtgctacagcaggaaaggaaatcagaataaatctgcaggtgatactagatgtagagaaaggtccgtgtgtcagaggtatggcagttgcagacatggtgtggctttggtattgcctggacatgtgaaggagctgaaggaccaagggtaaaatctgcctccaagcctgagtgtgtctgtgcacacacatgtacaagtccttcacccaatctgaaacttaaaatctggctggactgactggccagcaagctccggggatctgcttgtctacacttcccagcactgagattacaagtgcatgctactacagctggacttaatctgtactcaggtcttcatacttgtgacacgcgtgacctgagccatctcacaaactccctggttcaaaccttctaagtctgagcaattggcacaaaaagagccacccaaggcaccgtgcccagaaaaggctacagagtgcagcacaacctttgtacagagaaatttcggtggagtggcagaaactggttaaagaggcgtgtgaggaggaagttggggaaaagggtagaaggcaaagtttgaagaagctgaagtcaagtaaggggaaatggtatagtagttggcaaccatgtggcatttttacatggaaggttagggactggggaacaaggtagcacattcttgtttgaataagggccaggaattataattaatccttgagtgtttattaccttatcaatcacagcacatcttcttatatcccaattttacacaggtcacaaatgtgcatattgccacacaaatagggagagtaggtcccaggaagaagtgatttctggaaagagcaagtgtctggtggaaggaaaaggactgaaagggttgaaaaggaaaaatgtaagaagattcacctatagcgataagcacggggaggggggaggataaatgcaaagctattttgagtggcaaaggaggaagttcaggttggggggcttcaagtatcccagtagagatgatggcgttattagacatagaagtcagtattcaaaccaagaccatagaagacgctgtgacatcttcaggagaacggacaaggaaatggtgatccctctagaagtcaaaaaggtttgtggaagctgcagtgggtgataaagtgggatggtgcgtggacaaattaagtcgtgatttcagtaccagaatttttcatatttgtgaaaataaagccctatattgtcacgttttgaccaatgtggtctgtaaccctactagtctaccaggtaatcattgctgtgagctagactccattgaagccattttgtataatttttaataaagcacagctggagaaatctacatttttgggagtatgtggaccagctccagtttcatgtgtttccatcaaatgtaattttattgcacaatctgtagtgcctccatgtgtatgagaaagggagagatgggtgggagatcacttgcagaaaacggcatgtcaaagccatattttgtttataaaatgttaatttgtagtaatatttattcaacattttgtagaaatatagctattagaaagatactattctgacagaaagacaaaatgttcttctctccatattatcactgccaatagcccacacagacagtcccacaagactttgcctaaataaaaggtttatgttagcaacaacacagacccaagacttaatgagcctctggtaactaccaagggattgcagtgatggtagtccaatcatttctatcaccctaaataattaatgatcttgcactttaagtcaccatcactaaaattagtttcctagaattgagttaagtgaattctagcttatttcatagttgccaaaaggtcttgggaaaattaacttatgggacctatatgcatccactaaaaggaaatacaatggctactgaaagagagaggtaagaggaaaaactggaaatagcacaactagtatccctggggacacagtacatgctcatttaaataaccacagtcatacaatatagcatgggggggggtctacagaatgagcatcagtgtcagtgccttcaagtttggctcccttactaagtataaggtcttttcaaaagcatgccccatatccaggggcaggatccttatttgtgacatgaacaaactgggttctgagatttttctagatctagaccagaactcaattgaaaatttcttagtaggctacataaataatttgtattttggttgatggcctcttgggatggtttgtggcatgaagcagattcccctggatcaggtgacatctggtaacttagaacaggagggaaatcaattgagaaacttttccctaaagcccatgctgcagacagttcatgtagagtgtgaatattttgaaagaaagggaagagaaaccaaactgttccccacagtgagtcacagccactgcagttgacaagttggaggattcattccagatcattagtaattacataacttcagtgagttatctaacttgtctatcctcatcccctcctctgtaaaacaggggtgatgattcatcccttgtctcctctactgggctcagcagcaatgccccagattgaatacctttgtaattataaaatcagcagacatgtaagagattcagcttcccagctcttcacaactttagtgtaagactcagcagcccaggcacacagtcttaattcccaaggcctcttacatagcttacagttaacaaagatgagtctagaggtatggccctacagaagaatactccgagcacaggaaaatctctagggaattcatatatggagttaacataaccaatagatgaatactcccaacaaatggagcatgaagaaagctaaatagtcttaacctgtcagagctggaaatgtggctcattgtctcatcactttagaaacaacctgtgagcatgaacagatgacacctgctaccttctttccctaggtacatgtgtccactcatttattatgataattctatgagaagggcactgttctcactttacagatagataaagtagaaactgcagctcagaagtatataacaagaattgtaacaaagcagctaatattgatccagatgagagtgttttgcataaatctagcattccttccatgcttatgaagaagatataccatgtaagcataatttcagatactggtcaagaggcaacaacatcctttgtagagagaggactgcaataaacaagtaacttactgtaggggacagtaagccacgcttattagaggctggctacaggtgtgcctggccatgcctatcccatcctcatcgccaagcacacctgtagtcagcctctaacaggcgtggcttactgtcccctacaacttaccagagtagtagttgaaatgaggtgaatagaacaggttctgttggggcagagagaacatgtaagagcatgtgtggtaggttgagggttcaaagaaggcctctggggatagctgatgtttaagtatacctgggtgaacaaaagccacacaagcatggtccatcaccatctatctcttacaacaagttgtgagacaagaatcatttctacttatggtctaaagttgaagagccgaaggcccagagaacttgtccaacagctcagtaattagaattactgtttaaaagcagtctgactcagaggctgtggtcttacctgtgataacatatggcattcttgatgtgacctgctcaaagtcagggtcagggtcaggggcaaagagagggcctagaattgtcccctcctgattttaagacagtccctaccataatcaggtatgacacttctgggccaccataatgttcagagacaaatagatgaacaaaccaataaaaatatgttttgcactattaaaacataagagcacccaaggagggaccagatagacaaatgcatagatcaagatgaaactcaaggtcttgagtccaagcccctgtgtagacaaaaatccatgtgacaataaattggtagtgtgttctgggggtatagctcattggtaactgactgcatagtgttttcttgaacattaatgtgtgtccagacatgattagctggcactctagctcagattcctaggtccatgtctccttgcctgagggagctcctccatatactgtcctagaacatagtggtagaccttgcctcacagctaaagctaccaggaagatggcatgcctcagtggcaccatcacaggaagtactagatggtgacagaaggtaagattgccgaagactttgtcattgatctcaccttactgttttctattcaggagtttgagaacagaatgactacacccagaaactcagtgagtggaactttcccaatagagtctaccagaggccctcttgccatgcaagcttctcaaaaaagaaacctcaggaggccatcttcgctggtggggccaacacaaagcttcttcatgagggaatcgaaggctttgggggtaaggctgtcctcctccattccacaccctgaagatgtgctggcctacagatgctaatattctggctatatatggaattcagtctaccttgcacaggcagatctaagtgtatgtgttctttatgtctcacacagtgggctaggccagagggtataagagagatactcctagatcactgtagggtgaccttatatcatgccttggcttggaggtgaaggatcttccattctggtccattgttcaaattccagacacatctgttccttggaaatgccttgtgtgatgggagagagagaccagcaggaggatgcaaaattcttggcagtgctaccaatccatttagtatctttgcatggtctctaatcgggtctcaggcctcccaccttgcctttgacctccactagctatgggttcagttcaccaccagtgtttttcttctctcccaaggctgtccagatcatgaatggcctcttccatatttccctgggaggactgctgatgatccccacaggggtctttgcacccatctgtatgagtgtatggtaccctctctggggaggcattatggtaagttagaacagcaaccatttgtgagatgtgaagggggggaataaaggtcagaaacgttctagattgtttctgtgttgatgaaagtcagatgggcaggaaggttactgggttgacatagctaagtggaaagaaggatagactacaccatgtagctcctggttgaacatggccatgcttcatgtggattcgtagaaaggaattctgctggctattctcaaggcaggaagactgtacaaagcagggtgtctctacagttaactccagcagggtgggagacaccagatatttggtgtttgggaaggaagtgagaaatgggaacattctaagtccctgtaattttgttggttaccatggcacctgatgaaattattcccatcccaaataatccctctgtacttttgaatgcagcagcaccgctttggctacttaatgttcatgtttcccagacttatagttctgcgtgtgccatgaggttaggtagtgtttattttgccaggacacttttcatgactgagtcttctaagggtgagtccagaatctgagctttcagaactgaggtatattggttgtaagatttttctacactttaaagtttgaaccttaggaaaggaagttgagaaataatcactattacttcatgtagcaaccaatattttggtgaggtgtatatgttcaaaacaagtactgccttatatgctgtcttttagagacatggaagctattcagtcactatgaccccaaaagaacattttcactgattacaattagaaagagaagctggagagatggctcagtggctaaagccactggctactcttccagtggactcaagtccaattcccagcacccacatgcataaaataaatagttcatttttttattttaaaaaggagaaagaataagtgttgttttaattcacgctgacactctctcctacctatgcctcccagacagaagccctaattgtgtttttaaaactagtgactacttctaattgctgcctgtgtaaaacaggaataaatcatgttttatttatttcctttctatttaatggtccgggcccagagggttctcactggcgaggaagggtcagttctgtttctcttcttattcaattcctagctaatggtccctagaggttgaacagtacagactgagtatgtgaacctgaataacaaagaaatatagccaccaagaaatcgtttaatgggataaaatttgatgcatagattagtgaaagacattaaaactgtaggtggttccttcacaaccaatcatcggtgaaaaagtgacccttttctgcctccccgttctgccctttttcctcctctccctcccccttcccaaccactcctctctttgcagtatattatttcaggatcactcctggcagcagcagcagagcaaacctccagaaaaagtttggcaagtaatctatgtcttttcctacacatcaaacacagtaactactttctcagttgaaatcaagtcctggggacctttaaagagcttatcaataatcgattctctgtgagcaaaggatcctgtatcaatcctggttatgagaaaattttcttcatgagaaactaaaaaaaaaaaaaggcatctgccttaagtctgtgcaaagcaagagaatcaaaggcagagctcagaagagggcaagtacagtctctcagtgttaagttccctgtagagataacagacctgacatattctgaaataatgccatttttccctcacactatttaggaagtttgtccgatccatatgcttgagtcagattctacctaagtcagaaccctgagtgagtgagtgagtgagtgagtgagtgagtgagtgagtgagtgaatacagggtgctcctgagttttcaccccatgaaccaaagtgctaatcctggcataggaaatcaagataaaagtgaaatggggcattatgtgtgataggatagtgggatctgtaaggcctacagtgtgatcttatccttaaggattcatttacaacctccttaaaaaaaaaaaaaaaggtggcatacacaattcctgaatctggatgggtgaccagatctcactaccaaatttttctccagtaagtcctctaccaatgctgacttaagtcattgtgagttggtaagtatctgagtggactgagacactttgtaagtagtctgggaaattcaatttaggggaagaaacaaattgtttacaaatagcaaatacaaccaaaactactgaattgccattaataggctacgtagccaggagtgaaagatgtgcttcataaaataatcaataataccacagcatcgtggtacttggcatatgatacatcaaacttttatcaccagtgtaaggacagaacggtcacaaccatatcctctggcccatgtatcaagagacatctgagctcatggacctgggggaagacagttgagtgggggtacattgtcagtagggagaggtagagttattatggctgattcattttcattggctagtacaaacctagaagtttctatctatatctacaccaaagatctttagacacattataaaatccttcttatccctctgcccactgcctttttatgcaaagagatagtaatctggatgctcactaaatctctaaagcatgctgggagggtggtgataataaaaaagagtgtaggtacaacctgtgggcaaggcatcactgggattttgttttataaattgactggatggtgattgcacaagatgagaagactggaaaaggagggagaagaaaactaaaagttttgctttacggtgacaaagaggctaaaaaccacagtgagaacaaaactagaatataggtgtggagtctctctgagccggggagacagcagctggaatctcgcatcctacgttgttttctgaagagaaatcaaatctaactaacaaaggctgcctctgtttcaggtcaaagccaaagtgataatgaactctctgagcctctttgctgccatttctggaataattctttcaatcatggacatactgaacattacagtttctcatttcctaaaaatggagcgtctgattcttagtaaaacccccaacctgtatgttgatatctacaactgtgaaccatctaattcctcagagaaaaactccccatctacacagtactgttacagcatgcaatctgtgttcttggtaagtatgaaagcggtgttcctccggagaagaaacgtgctgtgttttattatgagcatccatgctgggtccaggtagtctgtgtctgcacttttcctgcacttggctttgggcaagaaccctcctcatatactactttcctttccccagctgtaaaacagggggagtaagactatgtgtctccttggattgatgtagaaacaaattagtttacataagcaaggcacttggaatcatttgtacccaagagtatacttgtgacttgattatttcttctgaggaatgggcttagtgtgtagccctggctgctgactatttagcccagactagcttcaaactcacaacaattctgcttctacctcctgaatgctgggactaccggcatgtgccaccacaccaagctttatgtggtcatcgttcacctttgttaatatcatggatgacattaataattttcgataaaaatatggaagaaattcataaactgttattaatatgttttctcccacagaatttttgaatgcagagtttaaaagggaaaggcaatacatctcccaagtattgtggagtttccttggtgtgatgtcacatattctaaagctgatacaatttcttctgagacagggtctcctgtaatccaggctggccttcactttgctgtgtagtcaagaacaactctggacttctggtcttcttgcctctaactcccctagtgctgggattacaggcacatgctaccatacctagtttacatagtgggactagaacccaggacctcaagtatgctgggcgagtaccctaccattgagctactgtaccagaccaagctgacagaatttaatgtggaactctttcttacaaaaattgattcttcagtttcctattcccaccttacttccttgtgttcagccgttgggttgtaaagatgctatcttttatagcagccattccccccagctcttcatttcactcacctgaagaactgagctgaactgttgctcactgagttccagtcatagtcatcactgtgcactaagtccatccagctgccgttacctcatctttacctccattctgtttccagggcattttgtcagtgatgctgatctctgccttcttccagaaacttgtgacagctggagttgtggaaaatgactggagaagaatgtgctccagacccaaatctgtaagttgcagttccttgtccataacgtccttcttaaaacttagtatctacaaagaattgtttacatagaatctaatctgacaaaaattctgaaactaggagcttcatttggaataaatggctttgctgtattttttggaaaacagaaaacaacagtagtggcagcaaacgttttgaagtataagtaagtctatggttagacagaagctacagttccacatgttgcacaagtttgcctgccaaccagcttttccttctggttgactccagactcccggtcctgccccgtcttagttattgtttcatggcagtgataagacagcatggccaaggcaacttataaaagaaagcctttatttggggctgacagtcctgaagattagttagagttcatgactattatggggaggagcatggtagcaggaggcaggcatggctctggggcagtagctgagagcttatatctgatccacaagcaggagtcaaagagagctaactggaatggcaccagcctttgaaacctcagagcgcaaccccagtgacacatctcctccaacaaggccatattttgacaagtattcaaagttttgagcctatgggggccattcttactcatcccttgatcacatgccacccccatcttaatctgtaacataggatgactgaagacaggaggctgataaagtcattggttcttggatttttcatttttccactctcctcccatgctcttcacctcattccacttccaagacattagtatttcaaagcatctccaaagctagaaaacatgaatgctctaatagtagctcccttataaactactgtggaactccagactataagatttagtttatggattagaagccattatgattacttcattatacagattgggagagggtagaatgagggcctcttcccaaggttatgatcaccaaaggcaaatcagttctagaatccaaactcctctctttttggtattatttttccatgtggtatgattattctaggcaaaatggcaaaggcctgaaatccttaatgattaccccagactcgagatttaataaggaggtgatttgatgagaatttgtgcatctaagtagccaatcctgctatctatagtatatggttaactaaataaagaacatgagaataagttggcatttggatacatgttgattgttgggagacgtgtcaagggtaaaggtcaagaggcatttgtttttgttctagaatgtagttctgctgtcagctggagaaaaaaaagaacagacaattaaaatgaaagaagaaatcattgagctaagtggagtatcttcccaaccaaaaaacgaagaagaaattgaaattattccagtgcaagaagaagaagaagaaacagaaataaattttcctgaacctccccaggaacaggaatccttgccagtggaaaatgagatcgccccttaaactctcttttataagcattattgtttagagagcttccaagacacatagttacccccatttcttggtcttccacatgtattttccatgtttccacagtttatctttgcatagagaagccatatctagctttccttcacatttagatgtagcaattgtagcaaactgtgttgtcccctgcttgggagtcttacatctgcagaaatgctgcagaacccaattctcattcacctttttcttggacaggcattttagtagaagtagtgcttttcccctgagtcttccatcagcaactgcagctgcagggaaagacacgtgactgttccatccaactctgaactctctgactccttccttatttacatttttaggggagtcctttttgcactattgttttaaggaaagtagaaaggaaatgaaagagaacaagacacctatgttttcaggggagcagacactgtggcatgttcttcaagcttctgtatcccatttggaaagccgtgaaaggcaaaaactaaccctgtctctgtacaaacaacataccttacacataagcaagtctctgtgtcttaacttggtccaactcctttgtttacctccttgtattgtattctttagtcaagaaaagaaagaatggtgggacataatgggtacccaaatctcaaatcataagcaacacttgtgcttacatgattctttccaaggggcagagtagtgtatgaaatagtttcgtttgctcatccatgaccatgaaaggatccctatcactattttgcaatattaaattggaagtaggaaacaagccaaagtatcctgtaatgaccacacataatagttgtggggacttactcagttcttcaaatcctggtgatgtttgaaatgaccaaatttaattatctatacgcaatgtctgcataagctggatcaagagcatcctcggattaggagcaatgtgttgagtcacagaagagtcagaattggatttgacaccaccatgtgaataaaaacacctggaaacttacaaagctaatcaagacattaatgtgcagttggttggtaagttataagatgcagatagtaagcactataaatgatttccgaaagatcaagcttagaaaaaatatagttaagatgccaaagctcaggaatccctaattttctagccctgttcatgtgcagggggaggctagcatctgaccctgaaacactgttagcctaagaaggtctcaccataaccaatcagtcagataccatgatcagccggcttcgaggcatgatggacaacttaagttacactccttggaatatttcaattttattagaggttactggtgggaagtaattcctataattataaagaaaatggaagtagaaatttcccctcatgaagtcttcaaaacaaactctaaatgaataaaactgtgtgttcatgactgcaatatctaactctaccttgggtgttgccttattcttcatagcatcaaacagcaggatgctcctgcagcctcagttcatattttgtaacaccaatctgcttgaatagagacacatcaggcatattgggctattcctacatacccacacatgcttccaaggaaactattcatccagtaggtcatttcatctcactcttgaaagccacagcatggttctccacatccaacacatggaaagtgcccctgccttaattaaatcctatcatggaagtggctggagtaaggtgagaggatgagtaacaagctgaaaaatctttaaatgccatgtttaatttctcaattttcccctatcatttccttaaggattttactttattgatggttaggttctcagacaattagtttttaccaaattttcatttctctttatggcataactttaatgtccattttaaaagaacgaaaattcttgctaatccctctcaaaaatcttctgtcaatgtagaatctgatacattccccaatgatggacatgtttatcaaagcagaaatttctctaactttaagttatattttcctctcaacttttatttttgtaaaaacaattttgtaaccataaagaacatagtcttaaaaaaacaaaaggtcagttgcttgatataccatacctggccgatatctatgacaggaccacctgtatctgaaacagtggaggaggagtggatggggcagtgggggaggggagatgactttgattgggatgtaaaaaaaatgaacaacaaaaaagcctgttacacccactgactagacacctaccagtagagaggttgattggctctattgtatggggaccagcagtgaggccaaagaatatcaaggaaggagacatgtggtggcacaaaactgtttaccttgtgataactgggaagcaaaaagagagagctaaaaaggcttgggatcccagtagcctttcaaaggcatgtcaagctttagcagtagatgtttagagggtatctgagatccaaacataacatatcataaagcatactgttaagaaaggtataactaaaaataagacaaaggccttaacttcaacatattagtgcctgattgaacataataaaaatgtattcaaaaataatgaaaaataatgagtctgtgttggactccaagaaaactcaatgagaaaggaataattatttcaacaaatgcacatgggatgcatgatagctatacacaaaaataatataaataaataaactgaaagtttaccttacacggtatgaaaaaaactaactcaaaatggatcagaagcataaatgtaagagcactcataaaaaaatacagacttaaaatttgtgaacttgaattagacagtagttacttaaatatgataccaatataataaacaaccaacaaaatttgagtgccgtcaaaattgtaaactttgatgatttttaaatattttttaaaaactattacatttgtgtgagcctttgtgagtttatttgtaccacatgtctgcagaagccagaagaaggggtgtcagatgccctggaactgcagatacaggtggcttttgagatgccatgtggtcctaggaaccttcaaactcaggtcctctgcaggaagagttaagcactcttaacagctgagccacctctctagacactaaaaatctcatgacttaaaggacccaattttaaagtgtaaatacaacccacataagggaaaacactcacagaccctgaatttcttaagtgcctttcggccatttaagattcctctatgagaattctctatttagatctgtaccccagtttttaactggattatttggtgttttggtgactagcttcttgagttctttgtatattttggagatcagccctctgtgagatgtggggttgccatcctgagtgaagaaaaatatggtatgtactcactcataagtggatattagacatagagcaaatgataaccagcctacagcccataaacccagagaagacaggaggaacctaagagagacagacatggaccccgcccccagggaagggggaaagggacaagatctcctgagtaaattcggagcacagtgggaggggaaagggaggaaggagaaaaagggagtaagggaagcaagaggagaacatgaggaatcattaaggtcgagttggggaagaacagagaaggagagcaaggaaagagataccttaatagagagagacattgtgggtttaaggagaaatctggtacaaggaaatctccagggatccataaagataaccccaactaagattctaagcaatagtggagaggccaccttaaatgtccttcccctataaggaaattgatgactaccttaaatgccatcccagagccatcaccccagtagctgatggaagcagaagcagacacccacagctaagcactgagcatatctcctggaatccagttgtagagagggaagggtgatgagcaaaggggtcaagaccatgctggggaaacccacagtaacagctgacctgagtaagtgggagctcatggaccccagtctgacagctagggaaccaacataagaccaaaccaggacccctgaacatgggtgtcagttgggggcctgtgaagtctatggggcctctggcagtggaaccagtgtttatccctagtgcacgagtgggctttgagagcccattccctatggagagctactctctcagcctagattcatgggggagggcccaggtcctgccccaaatgatgtgacagactttgatgacccccccatggggggcctcaccctctctgaggagttgatggtgggtgggatggggggttggagggggaaatgggaggagaggagggagagggaactgggattggcatataaaataagattgtttttaatttaaatagaaatttatttttaaaaacgatttaaaaaaaaaagaaaaaaagggattccatttacatgacatgcccagaatggtttcctgagacaggaagtagagggaaattatgagtagatgctaactgatgtttcctcaatcctgtgaattaatttaaaaaaaaaaaacacctaaaagggtgaattgtatggtatttgaatcatacattgataatatgtaagatattattgatgatataagagatagccaggaataactaactgacataataatccccattgcttaacatcaaataattaattgctcaatgacataccataggaaggaactcagtgacaaaaaaaaaaaagaacttcatgaaacaggaagtatgaataggtgaaaatatatgaaaagagaaaaataaaaagactacccataaaaggaaaatgaaagtacatgaattagtcacttagaagtgatagactggaaatgatggcgtggacgaaagtccccagaggacagtgacacttcattaagaatacctgcatttatctgtcagaggaaaggcaactcatcaaagtgagattgaagacatctaagaaagtaagacacaggcttacaggcctgttttggaaatgtcttagttacttctctttttttttaagtggaacttttttataattaatttattcttttgaatttcattttatattccaaccacagttcttcctcccactcctcctcctccagacccccctggcctgctccccagcacaccctcagtccactcctcatgggtaagggctctcatgaggagtcaacaaagtctgacagagtttggggcagggccaagcccctcccccacacattgaaggtgatcaaggcatcccactacagggaatgtgctccagcaagctagctcatgtaccaggcttgtatcatggtcccactgctggaagtccctctgacagtccaagcttctcaactgtctcccatatatagagggcctagtttggccccctggagtctctataccactgtcagtccagagttcatgagtttccacaagcttggttcagctgtagatttatctccatcatggtcttaatgtcccctgctcatatattcccttctccttttgtgcaactggattcccagagttaggcctggttcttggttgtagatctctgtgtctggttctgttgctatgataaagcattcatggccagaactctttcttacaaaagaaagagtttaatcaggctatgactccagagagtttatgatagtggagtgaggcattagcctcagatagctggaacgggaaatggcttgggtcttttgaaactctaaagcctgcccccagtgatacacctcctccaacaaggccatggctcctagtaattcccaaacagttccactaactggggaacaagtatccaaacatatgagactaatggtagccattctattcaaaccagtataggaagttaaggagaaaaagccttgaggagcaaggaagagaagcagaactctgctgaggagacactctcaagaaaaggagctgagcagaggccactgggtcccgggttagaggaagcatgggtagcacagcattagtaagaaaagacagagcccagttcactggagagtgaacatgctatgaagaattcacactgaggactgactctgcttttgagatgtctttactgtaaaggagagagatggccagtgatttgcataagaatcagggcaagagccagacagtactctggaggcagaggcaggtggatctctgtgagttcgaagccagcctagtctacagagtgagttccaggacaagctctaaaagcacacagagaaaccttgtcttgaaaaaaacaaaaaagaatcactgcaagaaatttttcagaatagatagatacaaggccacgtctcttagaaaaatgaacaaaattattgcgtgttaccacatggtgtcattctaaggacagagactagccatgagcagcacagacagagtctatctccattgggtatacagaattctgatgtcagtctgcatcttattaacagttgtaaagcaaagaatgtaaagtatagctggcactaaagactaatcgtgtcacttccagttaactgatatcctaatgacgtattgacactagtgtgtggtgtgccccatgttcttgatcctcggctttgacaggaataaccactatggtcaatacagtcaaaatgcatttgcaggctgcagcctcaaggacagagacacagctcctggggccagctgagaagtgtctgactctgaaatgtccaaaagttcctgtcctgtaacactcagacattattcctcattagttcccaaagtaaggggccacccacagctagctacccacagctttgctttcatctttgtaggaaatgaaacttgttaaaatttggcttttgcatgttacaggaaacagctgtgatgaatcttagcatatgacaggaaaagtgtgtgtgtgtgtgtgtgtgtgtgtgtgtgtgtgtgtgtgtgtgtgcgcacgcgcgcgcgcgcgcgcgcgtgttgcaatatgttagaaaacattattaaaatttcttaaatcagacaacacaatttttcttttaaataaatttggttcatgtgtgcgtcaaaaatagtaagtaaagctcgttctagggtgtctttatagaactttcacccacatagaactgcaagagagtcatttgaacatctctttgctggatgcactgaattgaattaatatcttattttttctcaccctgtaacgtatttgaaattttacagtatcataggtgaatagcagagtttttctttcttaggtataaggaaaataatgatgtgtcttgccaaacctgatatgaaagattcaatgacgcgtttaggtacatgactaactcttaagaaaagtgctgcaagagatgtttgaataatgacggtggtagttgatgatgataatgataacaataaacttagagccaggtattcgctttgatgaaagccagaggccataacagaaacagccctaagaggtgactctaagtttagctctaagtttcccacacttacttcaatattatttcattctaaaatagtctgccatccaaacaatataaatgtcatcattcactatcctggttagtttcttgtcaaattgacacaagctaaaggtttctggaaagaggaacatttgagaaaaacgcctctgtcagatttcctgtaggcaaatctgtagagcattttcttgattaatgattgatgtgggagggcagtgccactcccaggcaggtggccctgggttgtatagaaagcagactgatcataccatagagaacaagctagtaaacaccactcttccctggcctctgcttcagtttctatccccaggttcctgccttgaattcctgccctgactcccttcacaaaaaactataacctgtaggatgaaataaacccttccctacctgaagtacttttggtcacggagtttatcacagcaataggaaactaaccaggacattccactaagttcttttgctttgcttattttgattttttttttaaatatagactgaagctaggaaaagaaactgttgttaaccacgttaacactgcaaaagctaagatgctggtgggcatcctgtaaaatcagagaaggatccagagcaagaaaagatggtccttgagacattacagcctcgctgtgccttcttcaccttgtcttcagtgagcaatgcatggtagggggaagtgaaaagggtgtttgatgaggcaggtcagggacagcactgtgtccaatccctcacttctgctctctaagaaaaggataggagggggctccattccttccttcccaaccccagagaagaatatgaaaagtgactaccaaagaggaccctggactctcattcttttcagttaagtggaggtcagagatggagaagaatcaatgagtctggtggcttgaatgagaatgacccccaaaggcttatatatttgcatacttggtccacaattggtagaactatttggaaaagattgggatgtgcagccttgttggaggaggtatgtcactgggagcaggctctgaggtttcaaaagctgacaccatttctagttaggtctctgcctcatgattgtgtgaaggcgaggatgtaattatttcactagacctaaaataaatgataaatgggtgtctataggggaacaattacacagaaaaatacaaagaaccgtaggagcacttctctgcccttcctaccagatcagctgactgaccagaaagaccgagggaaggaaagccataccataagcttccctccttccgcttccatcctcctgaagccacacccaaagggggtgtggccactgttaccggttcacagaccagacacctacagttgtatctgaagatgtggtctctcagctactgctacagtgcctgcctgctaccccattccctgccttgatggtcatgggctcatcctctgaaactgtaagcccaataaactctctcttttgtgagttgcaacagaaaggtaactaagacagtgaaagagtacaaagaggacactcacggtcaagagtgtatgaaacaaagtaagttctgcttttaaatcaaggattgctcctgtgctacagagactccacaggacctgcccctcacagcaaggcctgtgtccatgcaggttctaggtcaactgcatccctgtggcatcgctgcctagggggccagcctccagcagcacagggctcaaaggaaaatccacagagttggcacatgctagacttttctctccgagggggttagggaaaaagacactcacactctcttgatggttcccctctttattctctattcttctttattctttccatgttctttcttctgtgtattttttctacagcttatatagcccaacaaaatttttcaggcaatataggtattacaatgtggttacattctatttttcaagtgaatgactgtaatgaatacaggtaaaaacatgtttttcatctcccttacatgattaaatatgtaaattttacatattacaggtgaaaaataaattatccccaaaacccatgtacattcatacccaagcaacttttataggttaaccatgtaggcaagcaagatattctcctcagtcaggtcttttactggcaagctgtactttgcaattgcaaagaaagggccaattactttattacttacaccttgaaaggtaatcttataaggaatcacaaacctaaatttttatacatgaaaaagaatccatcagctctactttaaatctttgggctgcatacccactcatcaatagtttcttatatcaggaggttgagggcaaaatgggcacaaggaatcacctctgatggggaatgtccttctgtatgctgttaatatatgtttttcttattggttgatgaataaaacactgattggccagtagccagaaagaagtataggtggagctaccagatgaggagaattctggggagaggagccagagagaggctgccagagagatgtcatttagctactgggaagataggatgtcgggcattttccagtaagccaaaactatgtggagatacacagatgaatagatatgggttaataattaagagagaactagccaataagaagcctgagccactggccaagctgtttataattaatttaaacctctatgcatttatctgggattaaggatggcaggtcaaggcggaaaagaaactctgcctatgcaccacctttgatcaacaaccaaacctaggaaagtacatcagctatcaataattgggatgctttgcatttttttaccctaacctactgaataacccagttatgtgtccttgtgaactttagattattttctggggtttttcatctaaaggctattatcaaaacatctgatttaacctggctttgtttcagctaatgatgaaacctgtgaacatatctcccaacattaagataaaagaatttaaactagctgagttattgggactcaattgtcttttttaatcattagcctaagctgcagtttttatgatcctcaatagaaacacgtgtgttctagctatgtgacacttccttgttttatttttagtcatcagaactctgtataaactaacattatcattatcaatcagacagtacatcttaggaaggaatcatcttcataataatccatgggtagatgcccagtagaatgggatgtttccatcagataaacacactacattacaggcagtggggatctccccacacccattcacaccatgccagatgccagaaatggaaagcagcagcgcacatgtaaaggcacagcagaagcaaaaggcattctgaggtctgtggtctctgggccttgtctaaccaagattcacccatcagggagttgtctcctggtggactgacacactgaagtcaactgccttctgctgctcctctaacacagccatgagcactatggactgcacatgctttcctactggagaggctagatttcagaactgtgcattgccctggagtcctagtcgctgttctatcgctgcaaaaagccaccatgatcaaagcaactcttataaaggaaaacatttaactgggggctggcttacagtttcagagaatcagtccatgatcatcacagcagggagcacggctccacacacagcattggagcagtagctgagagctacatcctgatccacaagctaaaggtgggggtggggcgaccctgtcacaggtgtttggaacctcaaagcctgccccccagtgacagtttctccaacaatgccacacctcctaattctttcaagtagtgccactccctggtgactaaacattcaaatacatgagcctatgggagccattcttattcaaaacaccttacttggggcagcctccctcattaaaaagaaagcttcttgagaacaaaaccatttattaataacctcagcctcctgagcacctgctcaaccaataatctttaaatagcttcatcagactctgttcttcatgaacccctggggaaatcacctcattataatttccttcagcaacactaactcctcaaattcaaaaacaaagacattcaccaacttccccacaaaggagaggtatgtgagctaacagatgtgttaatgagtttgacttaagcactccatgaggtaagcatatagaaaaacactatattgtacactatgagcatatgtaatttttcatttaccaatgaaaacagttaataaattaattcagagatcaattctaagtgcattgggttttaattctcttgggtcaaacattttgagacgagcaggtatttcgaagcataattatgtgttcctcttacccgattctttaaaaaatcctgcgacctgaagcaaacaggcaggccccattggtgcaccactcacagcaggctgctctcctaacctctctggtcccccatgacaagtcctcctctaggaccccccaccacccttgcccccccttatccacttcaactcaagctttaaaagtccttttctctcgaagacaatactgagacatgttgacaatctctctaggcagcaagcgtactgagtgcattatatgctcactccatttcaccttcacaaccagcctttcagtaagatattgatgcttccccattgcctgggggttagccagcctgccctgggttacaaggaagcagaggggaacttccttcttctctttctaaaccctgtttgtaacactcccatgtatgtccttacatactatccacttttttgcttttatattgtggaaatcaatttagattaatatattgcagtcttaaaataatacaagaagctcctggacacccttttgcttccctcaggttcaggaatgcagtattcagatgagccaagttaggggtcagcatggagtccctcagtagataaataggtaaatgagacaaaccagattcagaaagataaatattgtatttttctcatttgtaaaccatagattttatatagatacacaaagccatacagagaaagacagacagacagattagcaggaagtggcagaggggagaagaatcagggagacggtgggtgaacgtggtctaagtatgttatctgcttaaaagaaattgtctttgtgaaacctacgtacaatgagcatgcagaagtaaataaagcatattactctgtgtcactttagtagctctgttgaataggtgtgaaatttgccttgatggcactcacagacttctcctctctcctatgcttcatctgtcaaaaaagtccggggattccaaagatgcaagatgcttcagcatctcattttgtatccacataatctggatatgtgcatgaagactggtgttagaacatctgcagttgaaatacttaaatgtgtgctaatgttaattcctttctgactagctaccttttcaaccaggaatggagatgattaaacggctttctgatcacaaaaaacaaaaacaaaaacaaaaattctccagggcaattagtactgagcaatatcaggctcccttgtacttaaaataataaatgtcagatttttttaaactcaaccatatgacaagcaaaatgaaaggtattattatgttagaaatattttccatcctagcacgaacaccacatacacaacagtatctgtagctattaccctgctacgccagatctgctgctcaccagggaacagggaggactctggtgatgagatcccaagtctgaagatgcaggttctctacacagttaaacctttcagatagacaagaggaggagcacataaaggaaacagctgagaagagaagggtggtggaatatcctcctgtgttcagttacaaaggcctggactatgacccacacatagagttgggccttagcaaacattcagtgagtgtgcaaaattgctccgccctttaatacctccccagtgctagacacacgaccaattaattctttactactgggattcaagctcttcagtgggcacatactttaaggccaaaatatttgtaaccaaatagacacactatgcaagtattcttacagagttctccataacctgccacatgctgtggtaagtgcatagtgtcagagaggagacatttcctgcctctgcaaggttccaagttaactttcctgagagtgcaaagggaaagaaaacaatgtaagtatagctatccgacatggggtaggagtgccgattaagcataaacaacaacacctggtggcagaatctgtcactaataaaacgttgttttctacatgtgacagggtctttgtataaacaacacacagcaactatgactacctgtgccagatcaagctagccaaaaatcccagcatggggtggggagggactcacaaactcccaccccagctgaggagttatgggtaactactagggctgctgagtgaggaagggtcagttttcttcagggatgcagctcctgagaggctgcccgtgccccagcagatgctccacgggcggcactaagtgggctcggtgggttttgaaaaggagcactcggattatagtctaattaccttactcagtaaattgtggactttatcaagagatgaccatctttctagttggctctttgttgctgtgataaaacaccaatcaaaacaaagttggagaagaaagggtttatttgatttacaggttacaatccatcagaaagtcggggcaggaactcaaagcagaaagctgtaggcaagaattgaagcagtgaccataaagaaacatgctttctggcttgctccctggcccatggtcagctctgcttttctcatacagctgaggcccccctgcctaggtatggtgctgcccatagtaggtaggaccctccaatatcagttagcaatcaagaaaatgccccataaggctggagagggtgtctccatcgttgagagcattagctgttcttccagaggacatggttcaactcccaacacccacaatgcagctcaaagccatctgtaactccaaccctaggggatctgataccctcttctgaccctcacatacactcacacacataatgtacaaacatacatgcagacaaaacacctaaagttaaaaataagaaaaggaaatgcccacagacgcaaccataagtcaatctgatggaggcaattcttcagctgaaattccctcttcccaggggactctaggtttgtgtcaaaataccgaaagaaaaatatttgcatgatcacaggctaggtgcttgcttttctgcagaaattactccagtcagacagcagcccaagaacaaaatgaaagaagtattcatcatatttgtgaaagaggtactgatgaagctttattcttcagaacttagtcaccgtagttccctgagaaagttaacctcctgtgactcacttctagaaagtaaatctgtaatagtctctgagccagctccaactgctcctgggaacattagtcacatgccgtcttcacacaggtggtggccttcacacagtgctggtaatagcgataggagtaacttttccaagctagttagtgatgtcactttaatgtgggagaaacatttgctagaacactaattgacctgaggactgtttcagaactcagtatgatgaattacgtaaccgtttgccaaataagttttctttgtatttttaacagacaggatgtacaagttgtaagccaaaacttggtatttattgatgtttgccgcctgttttacaggtgtgttcctacactagtgacgtgagctattaataaatgatgttataagtcctgcctttcaaggtattgagaagataattaaagaattaagaatggcgatagtacacagaccctgctgtgggataatccttctgtaatctatgaatatgtattactctcattgattaataataaagcttatttggcccatagcaaggcaaaatgaggctaggcaggaaagccaaactaaaaatacagaaaggaagaagggcagactcagaagatgctagccagccagaggaacaagatgtgctaaagccacaaacctcatggcaaattgtagattaatagaaatgggctagtttaagttgtaagagctagttaatattaaacctgggttataggccaaacatttggaattaatataagctttcgtgtgattatttggaacccggtggtctgaacagaaaagctctgcttcatactgtggggtgctctcctctggaccccagattaggcacagaccacacccaaacaccaatttccaagcacaaatcaaacacaaagagatcctttattaagtgagacaaaaagacaaggtgagtgaatagctttgcaagtgttacttttgagagggaaaaagggcagtctgtgttagggtgagctaggacctgttgggaagttccgatagtactttaattaggatagtcagaataatgaattttgattgctggaccttggtgttttgataattaaaccttggtgaccagtctcaggaatgagtcaggcataacaaagtggccaaataagggaacagaccttggtagctagctttagaaatgtaatctaatggtttagcaagggagaggtgtagggagagatcctggatacctgtaccactgaccacgcccaaaggggaaaaggtgaaacctgaccacattatgtttgccatgctcaggcttgtgtttgccatgctcgggcctgtgtctgccatactcggagcttgctagagcccttcagccaagccacagtacttgtacagtaatgggaccagggatgaacaagaaccatgaaggaaggaaatctctgcctggaagtgagtctgcctagccagcagagcaggcacaggggacttcaggagcatcattcattgtctacttcacttcctcactacccagctgacagaaatcagactgaccacataggacctactcaggtctctctcaggactcagcagcactgagtcctttgtcctcctgtaatgatactgactcttggttctttaactatgcccaaactttgagcaggatcttgactcaaaccgtcaccttctaacgttcataacaccagcagctcaccagcatcatggtgtctacttcagaaaagtatgtgcaaatacaagtccacaaaagaaaggaaaccactacgaatacacaaaaataatgtaaaatgtaacacttaacacagccctactcatagaccagaagctgtttgcaattgatgctactggcagaggggaaatctgttctcctcaagggaataacactgggtttatcaaccacactccagacaggccccatgcacaggagtagttggtgaatgcagatggactccatggctgtttgtttgtttgcttgtttttagagagagagaacataaagtcaggtgggtagggaggtgatggggatctggaaggagttggggaagagaaaagaataagacggtctttcccatatatattgtaggaaattctcaaagaacaaataaaaaacatttttaaaaaacatttcttcttaaagttactgtgtgtgtctgtgtgtgtctgtgtgtgtgtgtgtgtgtgtgtgtgtgtgtgtgtgtatgtgtactctgcactgactccacttgctcattcaacaaacacttaagggatctcaccacatgtaaaatttaccagccatggagcttttgggggtaagaatacagaacacattggatctctggtcttagaaaacttgtttgtacctgtgatacacaattgaaaattaataaattagaatgttagaatgcctccaaaattataacacaccagaaatgagaattataataagggcagattgacatgtaaaggtgtttatgaaacattaagtctaaaaggtggattaaaaaaatcaatgcaatttgatcttaatatggtgagttttacaaaatcatatagatactatgtaaaatgaatcctggcatattaaagtttgcaaaccctgatgagttatcctcaataactgtgtccaggtgtccaaagtgtgggtgcttttgtgctcctcctctttctgttctttactgtctgtgttttacaactgtgcttgcttgatttaaagggcattagaatgtgaagtgccactgcatttgtgagggtcagaaagtgaaggggccgaagaaagggacaggaaagtgtcagtgtcagaacacacttctctatcaaaaaaaaaaatgtttcagtgcagaattctgctagaatttcaaaggagagctaatactaatactccacaaacagttcctcacaatagaaacagaaggaacattgccaaattctttggatgtgctacagttaccctgatacccaaaccacacaaagatacaacaaagaaagaaaattacaggccaatttccctcacaaacattgatgcaaaagtactggcaaaccgaatccaacaacacattttaaaaagtcatccaccatgatcaagtaggtttcatcccagagatgcaagggtggttcagcatacaaaaatctgtcaatgtaatccaccatacaaacaaactgaaagaaaaaaaaaaaaacagccacatgatcatctcattagatgctgacaaagcctttgccaaaatccaacaaggaacatacctaaacagaataaaagcaatatacaacaagctgacaaccaacatcaaattaaatggagagaaattccactaaaatcagaaacaagacaaggctgtccatatctattcaatattatattcaaagttctagctagagcaataagacaacaaatggagatcaagacctttatatacacctttaatcctagcagccatagagctaggatggtggtggtacacacctttaatcccaggactcaggattaaaaggtagacagatctttgttagttccaggccacactgactacacgaaattgatccagtcttaaaagaaacagctcacacaaagatgatctcagcacatgagattacacgcctttaatcccagcactagggaggtggagacaggaagatatggcagggcagagaaagaaatatatgaaagaggagacagaatctgagagccttttgcctctgaggattcttggagacaagattgccatttcagctgggtagaggtaagatctactggcttggctgctttgcttctcagatcttcagcttgaagcttgaaccccaatatccatctctaggtcttttatttttcgtgcaacataccaatcttgggcatacacccaaaagatgctcaatcatatcacaaggacacttgctcaactatggtcatagcagcattattcataatagccagaacctggaaatgacctagatgcccctcaaccgaaaaatgggtaaagaaaatgtagtacatttacacaatggagtgttactcagctgaaaacaaaaacaaaaaacaatgacatcatgaaatttgcaggcaaatggatggaactagaaaaaaatcatcctgagtgaggtaactcagacccagaaagacaaacatggaatgtactcactcataagtatgtattaactgtaaagtaaaggataaccatgctgtggctaagaatctacagccccagagaaactaggtaacaaggaggatccaaagagggacacatggatttccctgggatggtgaattagaagagatatcctgggtatactgggggtagggtgaggagtggaaacatgagagttcaggttgggtagatcagaggctggatagagcgggagaatacagaaaaaaatttcttgatggaggtgttgcatttccgggttaggtagaaacctggtgccagggaaatccccagaaaactacaaggatgaccccaactaagactcctaggaatagtggagagggtaactgaactgaccatctcctgtaatcagattggtgactatcctaattgtcatctgagagccttcattcagtaactgatggaagcagatacagatatccacagtcaaaccctgggcatcccgttgaagagagggaggagggattgtacaagccagggggtcaaggttgtgatgcggaaacccacagagacagctgacctgaactcatggtgggagcacacagactctggaccaacagctagggagcctgcatgggaccaacctaggccctctgcatgtgtgtgacagttgtgtagcttggtctgtttgtggggctcctagcagtgggatcaggacctgtcactggtgattaagttggcttttgggaacctattccccatgctgggttgcctcacccagccttgacgaagggggaggagctttgttaatttcaggacattagggggaggagctttgtgtatcatgctttgttaacagctatgggaggcctgctcctttctgagacagaggagtggatgggatgaggatgggaggagaggagggataggaaactgaggtggagatggaaaaataaatgaaaaaaatttaaatgtaatatttaaaagaacagaacacacttcccagcatgaatgagaggaaactgcaaaccacagtgccttcccaaatttacaaatcgagtgcaactgggtaataaaaggactttggaattgtataataatgggataggctgactagaagcaaggaagtaaaggtacttataaactccagataaacatatgagaccagaacagatcttggagctgagaaagagaaaactcagaggtatgggagaagctgcagaagtccactgaaaccactctgccttcctttcttggtgggtatgaaacagggctggactgtttgggtgggttcactgactcattttattctctgggttggagagaggaagccagtgcttgaatctgtattgagacagttgataaaggaggaaagagaaacccagaaatgaagacaaacactataaagcaggttacaggtgcttcaagtatatctatacacgcatgtatatacataaatctaacgataaaaacagtgggcgcagatgaatgcaagtccatgaatggtaaccaacaagcagggataccatgtggtgaccatgggctcacgcggaacaacagagacacagaagcacttggtttctgaatatgagtcattaaagatgtttctttctggaaaataagggggggcagtcatctttccctgggtcagcgatttttatattttctgaaagatgatgtctttagatgtgtgtgctgcatggttctgcgaaaatgttgatgagtcactctgatgtttcattatatgctataatatattctaaatgatagctaccatctccatgaaaaacaaaaaagaggtagaaagaaattacaattgtactttcccatctttatttgaattagcttattgactagtttttctcttattgttgtagaacctgggttttagagttcatcaaaactttggtgtttttatgtattcatatgcttaaaaaatagtgtggtagttctcatttttttataatatgatgataaataatttatcaactgctgagtgaaaaaaggaaccaactctatttttttaaaaaaaaaatccaccgggcattggtggcacacgcctttaatcccagcactgggaggcagaggcaggcggatctctgtgagtttgatgccagcccggtctccaaagtgagtgccaggtaggcgactccaaagctatacagagaaaccctgtcttgaaaaacaaaaacaaaaacaaaaaaaccaaaaaaatatcctggctcagtactgaactcaccgactttcccttatgtggatcctcattttgattggataatctgttaatctgtcctcctggcatcactttcatatctacacactgagtcatttggtatgaacccaaaagtacagaactgggtctcttcctaatcatttcctacagcctgatctggcacagatacaccctgaggctggctagcacgggtttttaagagtcaggtattagcagtctgtgttctgtgtgaaacttccatatgcagaaactaggtaacatacgaaatcagaaactgatggtaaataaaagtcctgaaattttcctaatggattcattagagtcaaaaatatgcaatgaccaccagcaaagacaataatattcttggtgtgtgcatttatctctgtctctttcttccttaccctctctcacaggacaatcatttcattgtatacagtttttaagcccaggaaaattcttgttctgactcattactatacccccatatcctgtctccttgctcttcacattgatcttttgaagttcaaaagaccctttttaccaaatggactcacatcctttacttgaaatacgactttgagttctaataacgcaatagtcgctgctgcttatcacactcttgttctatgctgggaatattaaatttatttttttagatttcattttacattccaatcaatgttctccctcccaccccttctcccacctctccctcacctctcccctagcccatctcccatccactcctcccaacaggtaagggctcccatggggagtcaacaaagtctggcacattaagttggggcaggacaaagcccctcccagctgcattaaggctgagcatggcatcccactacagggaatgggctccaacaggctagctcatgcaccagggataatagatcctggtcctactgccaggggcccctcagatagcccaggctccacaaatctttctcacataatggagggtctagttcagtcccatggaggctccattaactgctggtctagagttcatgagttccctcaatcttggttcagctgtccctgtagatttctccatcttgatcttgatctcccttgctcttaaaacagctttatgaaaatcaccatcattcaaactttgtaccagccatttagattcactgttttgcagcttagatgcaggaactaacagggatttaattgagaaagctgttcaaggcaccacagtttagtgatctatcaggctggagactaaaaagatctggaatagtacttagtctcagaaactggatctacaaaatgcatgcatggttcctgtttcaatagtatttgcatgtcatgaggaatcactccttatagccctagaaggaaagtattcttttattgtttttagcactgttttgtagagaaataaaagcaaagaaagttcaacaaacttgctaaacacatagctggtgtcagccagaattctaaccccaaaatgatgcttataattgaacacagtacacacccactgtggtatttaatgaatgttatccgaaagaggtcatttgaaacctgctgaagagaggcttcagtaactatcttactgttaatcagttatagcaacagataggaaactatattgatgtccataatgcaacttgacagtaaggaaggtggtctaagattaaaattatttgtttgaggaagttactagctcacatatggccactgatgttagtctccctaatgctatttatataaactgctcttgtgggttcttattcattcagcatctcaggcccaaagtggccaaggggattttgttggaagtaagtctccatgactaaatgtgaacaaaaatcactcataatccttaaagaaagtagaaggaaactgcataccaaaaacactgtgttcagtgaccttgggttcatttttgagatctctgcaaaccatcttcttgcttcacagatgtcaaagagcactataggagggatgtcttcatcatttgtctaaagtatgaattatataaccaacctattggtgcataaaaccactggcattgtaataggggtacttactcagaccatgtgttcagagtcctgacatttcagtcctccctgacttctgttgcccttcagaaacaatgaactcaggaaaacacacatgcgtccatgtgtgtttgcatacacacatatacatgaatacactgcaaaactaaatgtgaagaactgaaaattaaatgtattcccatcatcccctcttttgagccccaggatatacaagattccaaggtcaaatgagaatcatatttttattgcttgtcattacaatatgtgttcagttgctctctcccacttgcatagaaaattgacacttgacaagatttcctttcatttcttaccttgataaatgtgttacttttatatgttttctattgcttaggacataatgacatcttcccagacaaccacctaccccggaatgcatgtcaccattcccaatccttacccaccaacaagttccatggctcatcatcctcaacagcctctgggtattttaaatgtaggaaaccaagtacagactgggcaacttcccttcattacatctccaggaatcttcactaccaatcggtttggtccagaaaatgtgccaacggtgcatccagctccagtaacaacaacaaccaaagccaactttaaagatgaagcaatagctcttggggtgagtgtattgtcactagaatttttaatgttgcaattgcaatgtttccatgcatctgtcagttacaatagtatattgtccagtgagcaaaaatatttgaggattattctgataactgtgttctgcccagaaagaaatgatcagtctgtgtatgaattaccctgagctacttcattttagattcagtcgtgtgtctaacagttgacagaagactccctagcaggatgatccagtaaaatggcgaagtgacagaagcctaacaacttcttgcttgatctcactgctgtggaagtctttttagacaacctcctctctgtctttggatttgttacaaatgtatattcctataaagatgaatcatctttaaagagatcattgaaaactgttttaaattcctctattgagaattgtctatttagttctgtacccaactttttaattggattgtttggtgttttggagactagcttcttaagttctttgtatattttggagatcagccctctgtcagatgtggggttggtgaatatcttttcccagtctgtgggctgtcgttttgtcttgctgactgtgtcctttgccttacagaagcttctcagtttcaggaggtcccatttattaattgttgatctcagtgtctgtgctactgatgttatgttcaggaagcagtcttctgtaccaattcattcaagggtatttcccactttatcttctaataggttcagcgtggctgcatatatgttgaggtctttgatccattttgacttaagttttgtggagggcaaaaggcttgggtctatctgtagtcttctacatatccacatccagttatgccagcaccatttgttgaagatattctctttgttccagtgtatatatttggattgtttgtcaaaaatcaggtgttcttgggtgtgtgggttaatatcatggttttcaactctattccattggtctacctgtcaatttttgtgccaataccaagctgttttcaggactatctcaatagaggaatctaaaatggctgaaagacacataagaaagtgttcaacacccttagccatcagggaaatgcaaatcaaaacaactctgagataccatcttactcctgtcagaatggctaaagtcaaaaacaccaatgacagtttatgctggagaggatgtggaaaagggggaacacttctccattgctggtgggagtgccaacttgtacagtcactttggaaatcagtatggcgattcctcaagaaaatgggaatcagtctaccacaagatctagcaattccactcttaggcatatacccaaaagaagcacattcatacaacaaagacatctgttcaacaatgttcgtagcagcactatttgtaatagccaaaaactggaagcagcctagatgcccctcaactgaagaatggatagagaacatgtggtacatttacacaatggagtactactcagcagaaaaaaacaatggaatcttgaaatttgcaggaaaatggatggaactagaagaaaccattctgagcgaggtatccccatcacaaaaagacaaacatgatatgtactcactcgtgtggattttaaacataaagtaagggattagtaacctacaatccatactgccagagaaactagtaaacaaggaggatcataaaaaagacaaacttagtcccctggagaaggggaaagggtcatgatcccctgagcaaattgagagcataggaaaagggtggagggagctacgagaatgagaagggaagaagaaaaaggctgcagaggtcataagggagcagaaaggttgagtcaggtgtagattagaagaaaggatatgtgataggtagggttttagttgggggggtggtggaggaggaggggagggagaagggaactgggattgtcatgtaagtcaatcttgtttgtaactcaaataaaacaaaaaaaaaaaaagaaaactgttttaaagggaatagagctactagcaaacagtctggggaaagcaaaatgtgaaaagcccttggaaatgttatgtctttgttgatttacttcccaaaagttgacttgaactggacacccacaatcttgtttctacagtcattgtaaagcaagtctgtcttacagcaaagactccacatgcttagacagaagtgaccatcatttgctaagctttccccatacctcttcacaggctcccaccaatgtgtcatgtctcttcctgtgtacagctccaaaatcttggctataggagttagtagacactaggtgtccactatgtatcagaattcttcagccatcttgccagctagtgctttgggtagtttagtcaagtcacggtgtttcaggcaagtaaaaatgaacagtaccccaccctccactccagcagccaatctacactgcaaaggtggctccttggatcttcccctgccaaatggagtacattccctgaaaactcgtactcacaaagccaacccacgcagctgctgaaaacatctggaagtacaatgcaacacagtctctgccttggggggcagggtctatgggctggccagggaaatcagactgtacacatcatgaggatgcaatctagagaatgtgttacaaggtgaaaaataatacatagataatgagggaggtaacccagactaagagagacaaaaatcttgtgttttctttcatatgtacatcctgccttttacttttcagtgcaggggcggtgggtgtagtgtgagtgtcacaagaagagaaaaagaggtgttgaggaaaaagatggccaataggacacaagtaacacgtaaacagaagggaggcttctgggagtgaaatagatgagataaaaggagaaagatcaataatttcatatgaaaatgccagaatgaatcctggtactttctaggctaacttaaaaattaagtaagtaacatacagagttaagagggaaaagaagcaggcagtgaatgggtagaccctggaagttgatcaagatgggcattccaaatgcataaggtcagagttggccacacagacatcaggacaagaaaaaatgaccagtgtaaagtcttcagatgaaaaatgcatgtgaggtatttgatgaacagaaggaggccaataaaggagagcagagtttgcaaaggaaggaagagctgggaggaggccagaggcgaggtagggggcatacctggtagaacatctggagcagacagctttggcttttactgtgtggataaggatccatttggagcattcttcctgatagaaaagaaaataagcaatcaaaatatatttaaagaaaaggtgaagttctgctttaagcacacacacacacacacacacacacacacacacacacacacacagttgacagaagctgagtcctctccatgaagactgttaagctataagccaagttatcacaatactttggggaccacagatggtgggggtaggatatctgtccccctccactcaaaagcactgtgatggttagctgtaactgtcaacttggcacaacctagaatcacctgagaagaaagactcaattaagggttgccctgtgcgcatgtctttgaggttttgtcttaattaagttcactgatgtgggagaaaccagaccagcatgggtgaccccattccctaggcagcgagacctgggcagtataagaggggagaaatcaatctgagtatgagcaagcaagcaggtttgcatacatttctatctcatgttttatgattagctctttgaagtttcacaagcctcagtgaatttcaacaatatattattgttttagcatatttgtgaaattgttatttttcttttaattcaatttaattttatctagtacctattcattgaggaaataaacacagaagtttctatggctgtagtcttcctggatagataagatataagcataaacttgagaaataactatagataccttattgagctttggaccaacatagcagctgttgcttatcagaaatccatgtttactctgcaaagaaagtggtgataagagttataaagaagtaaaagttttatcccttatcactggtaaaacacctcttacctagtatgatggcagttgcataccagaagtctagtctagtacagtggctagaaagatggtgctggggttaagagcactggctgctcttgcagaggactataacgagaacaaaggcgatctgtagtccataaggtcaagatatttttattcagataaacaccagccaaacacaagccagagcgtgcgaggagcagcaaagcagggaggccagaacgaacggggctcccatgtgctcaccaccccttaagagctcatccctcgtcatcctgacctcaccttgaccacgacttgacaggtatggtcagacacacctgtagccagcctctaacagacatggattactgtcccctacagaggacctcagttccatttctagacccacttggtggctcatagctgtttgtaactccagttccaggggatctaacccccctcttcaggcattcttaagcaccaccaggcacacaagtgggtgcacagacatgcatacaagcaaaacatccagacatcgaaaataaaataatttttaaaatcacaaaatatgaaagaatacaaaagcaaatactgtcgtgtgttttttatcttaaaatgaaaaagaaatacacaaagaaaaagcccatttgcctagtataataaccaagacaactcaaaatgggtggaacccagctgagcctgaaaggacagactgctaatgagttttggagttagtctgctgccatgctttctgggcatctgccccttcataactgtctagctttgggcacttgatttcttacagctttgtgtctccacctagttgttggtagcgtgacatgctagatttttagagcactgtcaggcatatgacttcatctccattgattcttttttctcgtgacaagcattgcctgtgcaggaaactgtgctacttctgcaagacagccactgtcaccccagtcacagcattctttacaaactaattctttacaggggactctaggagatgcttagtaatcacactttccaaagacttctctgtaaaccattcagaaatcaaacaaggcttcttaaaaatatttattatgtgtgtgtgcgcgcgcacacgcacacgcacgctctctaatacaccagcacttacatagaggtcagagggcaatttgcaagactcagttctttccaccatataggggctaggcatcacactctgatcatcagacgagacaacaaacatccttacccactgagccgagccatctcactggcccctcaaatttttgaatttttttgaattaattaatcaatcaatcagtgtccagaccagtcacagtttcccttccctcctctcctcccagtccctctccccaacctccacccccatccaaatctccccctttctcttcagaaaagggcaggcctcccatgtatattagtcagtcatggaatatcaaattgcattaggactaggtacctcctctcctacgaaggcaaaccagtaggaggaaagagttccaaaagcaggtaacagtcagagacagcccctgctctcattgttgagagcaagaccaagctacacaactgtaacatgggtatgtgcggagggcctaggtcagtcccatgcatgctctcttgctgccagttcagtctctgttcagctcagtcccaacaagcccaggttagtagattctgtggttttcttgcccttggccctctggatctcacaatactttctccccttcttccacatgattccctgaggtctacctaatgtttggctgtggctctctacatctgtttccattgttgctaggcaaagcttctctgacggcaattggactaggcaacaatctatgagtatagcagaatatcattgggaatcatttcattaactatttttttgccagtcatgtttggttctatcctaggtctcggggccatccagcttctgggtcctagccctccaggcagtgtcagggtgggatccctctcatggtatggctctcaagctgaaccagtcattggttagccagtcccataatttctatgccacctttaccccagaatatcttgtaggcagggcaaattgtaggtaaaaggttatgtggatgggttggggtcccaatccccccccattggaagtcttgcctggttgtaggagatggccattcaggttccgtatcccccattgctagaagtcttagctagggtcaccctcatagattcctgagagtttccattggactaggtttctagctcatcctagagatgcccctggttccagttgtctttaccagtactctctccctccatcctctccccacctgatccctcctgtccctaccccacacccattcacacaccatgccccatccatctgtgatgtctgtcctattccctgttcactgtgagattcttatgtcctctcttgaacactccttgttacttagtttctttgggtccatggattgtagcatggttatcctttacaactaatatatatctataagtgagtacgtaccatgtttatctttctgggtctggattacctcactcaggatgatcttttctatttatatccatttgccagcaaatttcatgatatcattgttttaacagctaagtgatactccattgtgtaaatgtatcatgttttctttatctgctcttttgttgatggacatctaggttgtttccagtttctatctactataaataaaactactatgaatatagttgaggaggtgtccttgtggtttggtagagtgtcgtttgagcatatgcccaggaatagtatagctgggccttgaggtcaattctcagttttctaagaaactgccatattgatttccaaagtgattgttcaagtttgcagttccactagcagtaaaagtgttcctcttactccatattctcaccagcatgagctgtcacttgtgtttttgaccttagccattctgacaagtgtaagatggaatctcagagtcattttgctttgcatttccctgatagctaaggatgtcaaacaagggttttagctgaggcctctcctccccagttgtctcagtatacatcaaagtattcagtgtttgggtgaattctcaggaatcctggcaagatgaacagtaaataaacaggagtttcacaagctagacataaagaagtcattttttaagtacctctttgttttccttttcaggcagtccacatcataattggattgatgcacattggctttggagttgttctcgggttgctgaactcctattactacgtgtcttgggcattttactctattgcttttattggtggatatccattctggggtggagtctctgtgagtagattgttagaacacctcttcctgcacagtatgtgtgtctccatctgttcccagctcagttcttgatgtgtctgggggctagagagcttccagaaatactacctctggttgagcagcagaaaaaagggcctgtcactccccactccagacaggttaaactcactcctaatgcaagcacggatcaagaactcatgtattggatggagagttgtgaaaggaattatctcaaacatgacaaaaaaatagttcagtgacaagatgagattgaagacaagatgaggctgaggacaagatgaggttgagcaggaagcataattattcaaacaaacccagagtcatctgtaacaggtgttctgcacacacaagaaaatgagggtgcagaatcagagatgtatccccaaaagttactcttaaaaaaaaaaactgagctgacagccttaatgcataggagaggggcttggtcctgccccaacttaatgtgccaaactttgttggctcctcatgggagccctcatgagaggagtagacaggtagtgggctgggcggggagggtaagggggtgtgaggaggggtaggagggaaaactgtggttggaatgtaaaatgcaatttaaaaaaataaatagattatatatttttttaaaaaaaaatgagctgtatgtgagggaaacaaaacacacgtagctagagcaacctcttgtagaaggagacagttccaggcacagaagagaacctaccattcacaaatttgtctgtttctatagttcattgcttctggctcactctccatatcagcattcaagaaatttactccctgtctggtaagttagaaaacttagttctactttttaaattcctttaaagactggtttgatttactaacaaggaaaacttgagatggtagtttcaaagagtggagatggaagcttgttctcaaactatctgccagcggccgggtaacgcctggactgacgcaggggatgggtgccctgagtttgccactgagaaaggcagagcaccacatccaggctcttgaaagcacaagagtgggaattagtataagtgttgtctaagctttaacccgatgtcccccggttctgttgggtcactcagcattcaagtaaaactaaggaagactctaggagccaaaacccaactacatgccccttcaataacaaagtccccggtgttcactgccacttctcagctctgtcttgtgctttcactttcagtgtgtaatccctagtcttattcagattgtgtctgttgtcagttcttcaaactgccattgaaagaatctagttcagaggctaagaagagcccacagaaatgtccacagagatgggggatcaattctctcaagccacagcaatttcctggtttaatggcaaaccaggagaaagacattttccccctaaacctagagcagacatggtttcaagattatgtgaagccatgcatcagaacaaaggaggaggagatgggaatatggaatcattttgtctgtgtgttccagataaatagtggatcaagctagagttagaatcagcttagctctgattagttgcatctactataacctaaaacaaaacagagcatttcttctctgtgtaggtctcacccctcagaggttgtgtagaaaaagactcggtcttttggtatggtgcaactagataggaaagtgtcatgtgtgatggctgtaagagttaaaagcgctatcatttaactgggattgtcatgtaattcaatcgtgtttctaattcaaataaaaaaatgataaaaagtgatatcattttaaatatgggacaaagtacctgtcagataataatgcccattaaaagtttgttcttctggctcagcagttaagatcactgacttgaccactcctctagaggacctgggtttcattcccagctttcatcgagtgtctcacgatctctataactccaggtccaggggatctgatggtctctcctgtcttcctgggggcactgcatgctcatagtacatagatatacatacaggcaaaacacttacaaaattttctaaaaattaaataaatctcaaaaaataaaagtttaactttatccttttattgtttttacaaagtagggttgctttttttggggggacagggtttctctgtgtaacagccctagctatcctggaactcactctgtagaccaggctggtctcaaactcacagagatccacctgcctgtgccttccgagtgctgggattaaaggtgcgcaccaccaacaccagctggtttttaactttaactttaattttttcccacacaatatattaagtatattctctccctcccccaactcttccctggtcttcctacccacccaacttcatgttctttctccttcataaaaaaaaaaaaagagaaaagggagggagggagggagggagggagggataaagaaaaaagagagagaaaaacaaggaaaaataacaaaatcttccccatagatccctgaccactgagtggaggggtttgatgaagacgtctcatgaggcttgagtgctccaaagtctctcactctctgcacactgtctagttgtggatctcacacagtagggctgttattgtgaacaaagctagtatgtaaatgtggtaaatgagcttctgcttcaaattatatgatttattatattctattgtttgcaatattttcagctttttagaagaaactgatacctagggtacagagtaattttcacaactactcaggaggacagaaggaaggcatgtcagcttcaaatgttgtttcatgctagggtcataagtcagtggcagagcacctgcctaggctgcatcagaccttgagtccaatcctcagtacaatcaaaactaaaatacgatgtcaaatataagaaccattaacttgcataaactccccactccctttaaattcatttgtcttctacatgatttactgtttttattgcctccaataggtgaaaagcaccctgacaatgaacattattagtgctgtctttgcctttgttggagtgattctgtttgtggtcgatctgaacatcaatggctaccattatcaaaactactggatggtggtcagtatcctgtcatgggtcgtctgactgccctctcatcactgccagagaattagctattgttgtctcctatttattatgcagcagctctgttgagaaaattctctctatttctagccctactcctaggaatgtgattgctaagatacaaaatgagaaacttatatttgcagataggcgaagtcataaagagcaccctgtggccatcacaggagcaatggatagagcatggcagctccaaaatatactcagaatttctttctcagcactttaaaattctgcatctataaggtatcaaagtttgaagtgactttttttaagaatgaaaacagagaggcagacactgtcggctcaggtgaaatcaacttcctctgattatttctttattgtcatcaaatgtttattttggagaaaaacaaattaattttgatttttctttaaaataccagaagacttttcctttggcaagtagactatttaggaatatcagaaaataagtgtatggctttttttttctttgcaacaatctccttgctgttatgaaaaatgtcactcacagagtaggttgaacttgagtgagatagcacttttgatgagtcaggacatttctgtaatctacaagaccctcctgtttggcctaacattctacatatttctgatttcagctttctgggagaggaattgcaggtatgctggcaatattttcagtgctggagttcggcgtagcatgtgccatgacccactttgccaaccaaaccaggatgcatggtagtaacagggtaagttgagtctcttctttgtaaaaataacctgaacacatgatgcagaaacacaggctcaagtgtgggctgactacagagctctctgcactccactctgctgggacgggagagtgaatggactgtgttaacaacactgcttgtttttttcttatcctttctagtctgtcccgactgctccaagtatgtatgtggtcgactccttgatgcaagagtctttcccagattctcggagatatgataacatcccagcttatgctcctagacaataacaagcatgaagaatcactggtacagtttcatacagtaaatcttctctgtaaagaggaaatcttatgaaactgttttttgctgcccacagtgtctgcaaatcaatttagtgcctgatttggtatttggaatttgttcctaggctaacatccctgggtcttcaatgagggcctctttctgcttaccattactgcaactgttgaagggaaaggtcaagaggactgaaaactgacgctgcaatgctcttagcattagaaatcttctatccatgttaccttttccacaataaaatgtcatggaacataagcctctttgggtatctttctgacagacactagcaaggctggtatttcttgaatggagatttacatagtgtccagtcactggagttccttagtcatcttcccatgttctgttcagaaaccacaggtccagtgttgcctaggggagggcacattattttaccaatgttgcaaatcaatattgtcaccaaccagctgactggtatttatattttatttttattattttttattttataaatcaccatataatatattagatgtcactatggagttttgggggttgttcttaatttgtctttaattaaaatgtaattacatcactttcctttgcctttcttccctacagcccctcccaagttccctccctccaactcttcccatgtctccacattctcaaatggatagtctcattttattattgctgttatatgtaattatatacctatgcacaaatacataaatataattggtttggtctgttttggttgttcatgagtacataaaagctgaccactttgtatggataacccactgggggtccatccatgaaaaaggctaattctcactctctaagtagtcagtagttccctggaactctgggtctagaacttgttgcccatgaggtctcccttcctcattagcatatcaggtgatactgctacttctccagacctgtttacataaccatagtaccagaaaacactgcataggctgtaaagggaagcaagcatttaacagtcctacccaactgtgacaattatgaaccacaacaatgactgacatggcaagatatggctgttgttggtaaccaacaccagtctaatagagttaggccccctcaacgggagggaaatcatgcctgctgctaggaacctagacaacttctcaggactggtgaggtcatagatcttattagagaaacaactaccattattttactaggccagcataattcctaactacagtctaaatcttatgcttaaacccaccagtaaatgcagctgccacccctcatcaaaaaaaaaaaaaaaaaaaaaaaaaaaaaaaaagcttctctttacacagatggaaacctggacacaaagcagagcaatggatcctgggtgttcccaaccagagtggagacacctttttcacggatcatacatctacagctcaggcaacatggtggaagaggggctagaaagatgataagagccagaatacaaggaggcctgctctcaccatggcatttttggacaaagcgtgttttaacagtccctacccctcacctgcccctcccactacccttgactccccctttcaagccctcagtctcttttcctcttcatgtcctatgtgtccttttgcctgaacccatctgatgggggaaatacttttgtgtatgtttataaataaagtacttgcttggccaatgagacagcaggttaggctggactaggagtcaaagaggattctgggaaatgtagtagagaagtggtgttccagataggaagtgacatagcaaggagactcatatttaagaagaggaaaaaggaagtgtcgctctcttttcccctcagctcctgctccagcggcatgatgtgattcaccagcaaggagggacgccaataaggcgtccgataagataagtctcataaaatatatcgatgtatgataattgagactgagctaacatgagaatcctagtcattggccaagcagctttgtaactaatacaagtctctctgtgtattcatttggtcctaactcgggcaggcgggcggctggcgtaaagctcacatgtggtggtggggctcaggcagcttttggtggaaagatttattgtaacatccatccttcctcttctctcctttcttggtctccttccaagtttttaaagctttactcacaattacatctgtgttgtggggtatatatttgtgtatcacgagccatcatcagcatatgagaaagaacgcgtggtgtgtgcctttatgagttaggtcacctcacttgatattgatctatacaaatcccaagcttcctttactttatgcaaatggaagccagggaaaaacaaagggtggcttcttcagcacaggctattctgggtctttgagtgccaagaggtcatagacaggactaattgatccagagacatacagcttttagtcctgcaagagaggatcatggatccaagggaatagacttacaggtctagatactcaggtcaggggcttacagctctgggtttccattatcagcagtcccacacttagtgaccagaaattgatggctttcagcagccactaatgttggcattaataagcaaaagccagtgttttggctttcagatcccaagtctcctaatagcagctatcattatagctcttgggccttggctccttatggcttgctgcctccctggacttcttccagcaactagggcccacagtctctcacaagctttaactttcccaaccttctaccttccacagtcttggctctcgagttcttttttctttcctccaccatcttgcatcacctcagctgcctcagttccccctacagtttctgcctctgatcactccctggaattttttaactgtgttctttaccatgtcccctcctcttttattgttatcaacttagcatccgatattcatgataaagatcacaagtagacaagagaaactgtttgatggggtctactattataaaacaagggtaaagcacaaggaggtacccctggaatgacttgaaaagtgaaccaaacatcctaggtatatacccagaagagtggtgcaacatgcaaataaagcaatgtcattgctaccaatccctacccagctttcagttccactagtcacaggatgagagccaatcatgagctttcccatcatgcctaaggaaaacagttgcaaggagtgcagggagatcaggattactcagagggtactctggcttttcttgagtgacgtcttcttcatgactggagccagggaaacaggtaatggcttcagtatggtgctccttgcagggggagtagtgtgtccttaaagtctcattagagcattcaagtgcaataaagtcccaccagaagaggggtttcttggttgatagctctctgccagaggcagctgaacacatgggaaggatctgacaaaggtcagaccttttgtcagttaaagacttgaaccagctggaacccagtgacctaactcacttaagaaaaaactgtgttagcaggtgtttacaagacgacctgtcttagacatatgaaataactataaaagtagtacttccttcaaagaacaaaactttcagcaaggctgacttttaaaataaatgtgtaatatattttatatttcacttttcgttaatggtagtaacaatgataatagcaagtatttagctctctgtatgcattaatcacattttgaacatgtatgttatgtcagtgtacttggtacagcaacccagcagggttctatgattaatatgcaaatgcctcttaatattaacatgctttaagatgacagaactctggcacagaagtttgtgaccttgtcctaagacaagtggcaaataaaaattgaagagcaaatgagataatgttagatttaagtagtttgaatatagatgaggctcatctgtattggaagttttaaaatgtaaagcattagatagggaatagatggataaatagatataaatatatttacgtagatatacatagataagactagattatataggtataaatctatataaggacggatggatggatagatagatagatagatagatagataggagaaataaaagtcatggaagaatcagatgagaaattttgcatttgagaagttacatgcattatttcaggggaaaagtcacttagtacccaagtagaatttgaacccaagcagtcttgcatccacatatgtccatttttcctgaccctgacttttccttatttggaaacaatcaaagatttatagctagaaaacaggtgagcaaaacttgttttccaacagcagatttgtagtaactttgcaaggtctaattcaccctccttcgggaagcttttatcaggtaattcgatgtcactgcttccaacacttgtttgctgaaagcttgaatatcctgtggatcgctcctgagagtctctagcctaactaccttagaacagtgttctcaatctgggagtcaaatgaccttttcacagagatcacctaagaccatcggaaaacagatgtttgcattatgattcaaaatagtagcaaaattacagttatgaaatagcaatgaaaataattttatggctgggagtcaccaccataggatgaactgtattaaagggtcacaaaattaggaaggttgaattcactactttagaatgtcaaatggcttctcaattttcaacttaccaatttgtctttgtactgaatcatcaaaagacacacacacacacggttggatctcaaacacctaagatttgcacttgccatttttcagagtgggataaacaaggcaacctagtctagcaatcaaacaaaggtagaagcataaacttcttaaactgccatggttttatctggataggagtcagagccgtccatttactcagcgagtatttactgagcccttcctctagagggcagcatttcctgtgctggagaaaaatagacagggttccctccctattgcgggaagcttataccacataaagttaagctgccagtgggaagcaaaatcaagtagaggttacgcatatatattatttaaaaataaacaacaaaatttatagtttacattatatataaaacaatatcaaaagaatattaatattacataaacatattaaacaataaagtcaggttaaatatttaaatgtctctaagcttcctaaacttgtgtctgtgagctgattgaaacctgagtagtgcctgaaacagaaatatgtccccacatagaggttacataattgctactaatttcattctggcacactctaaagaagcattcatttgttcacttaattgcttcaaaaatatattgaactactgctttctggccaaataccactatataaaatttacatatacatatgtgttaaatgactatatatacacatatatacatgtatatatatagacatatatatgtctatatatatacatgtatatatagagagaagagagacatatatgcacgtacgtatgtgttaaatgtactataaatatatatgtaaatacacatctatatatgcatacagttttcttgcagtttctacatcacttcaatgccattcagtaatgaaaactactgatttacaaactattttcctcccttttggcatttacactgttggggcaacgttgcttattttatttcagcatcgtagccttcctgggacacatacatcattgatttattttccatgtttgaagatgagagatttgagatgttaagggacttcacaatctagtttatagacactagagttaagagtcttgttccagcaatctaaatggacctctagagttcacaacctcaccccttatttcctccaagccatccttaggagagggtctggcttgtgacaggcatgggattgtgtaaagaatactgttgagaaatcacaaggtccagggatggtctccacaccagctctggctgtatatactccgctgtattactctccaacttggctctctcatctgtaaaattaggattgtaaactaggagtgagtactgaatgaacatatggggtgacatccaattaaaagtccatatcatattctgaagtgctgatgagtaactgggggagcagaagtggtgaaatacaaagtgaaactgtaggtgtggtgattacctgggaacaggtgttgtagcaaagagtttgcctggaacgtggctgagctggtggaattcaataaattatttgtttttaagaatgaaagccaggtggcgctggagagacagcttcgaggttaagaacactggctgctcttagaaggacctggattcccagcacctacatggtaactcacaaccatctataactgcttccagtggcacttctggtgtctgtgagcacagcacgcatatgacacaatctccaatctagataggttcatttctgctttcttaataaacaaaacccccaggtgtttgcttgtttgtttcatgggtagaaagaaaggtttgttggggatcaaactaaaaagtttatctctcagggatagagagaagagcaaaatggcagaaaagcaagcagattttctatgtcatcagggtggtgtctttgagctgttataggctgtccaaactgcctgggaactaggtgcccttacccaaggttgttgacctttgcaggaagattaagggagttttcttccaaacaggagcctgccttaggagatctgcttttctgacaaacagaaacctgctatttacctgacaccagtttttacgttggtttacctggtatcagtctttttgtttgcctgtccaaagttcaaatgtcaccagcactgccatttagggtactactttggacctaacaccaacctaacatggctggtgacctcatggaaactgcattatggagtcccactttttaccttcccatatagtctagaatttcccactccagatgctgctggggcctggagtaattcctggaccccccaatgctaggattgcagatggatgctgcttggcctggctcttgcatgggtactgggcattcaaactctgtcctcatgcctgcactgcaacggagtgttgtaccacaaactgcctccccagcccactctttccttttaaaatcattttcagcttattttatttccagtagacacttaccatcttgagctacaatagctacacaatgcttttccctattctaagctcaagtgccaagcatcattgttcagaattctataaccctgggagcctgggaatactcagacatgttcagctgggtcagagtcaatgaatattacaatgactcatattttaccaaattgtctccaggaaagaatggaatttgccttctaacaacagaactgcttctctataagacacataggtggaaattaatatttttaattgaaaatattgattctttttctatacaatatattctgattatggtttcctctcccctaactcctctcagattctccccatatccatatccacccaaattcacaccttttccttttctttctcattagaatacaaacaggcacctacaataataataataataatattactaataaaagaacataaaaacaaacagaccaggataggacaaaacaaacaggaaaaaaggagcccaaaaaaggcacaagaaacacatgcccatgctgagacatatacattcacacacacagaaaacccaccaaaacaaaatgagaaaccataatatataagcaaaagatctgaaagacttaaaaaatgcccagagacaaaaaaaaaaaaaaaaaactcgaaaaatagcattgagttcattttgtgttgaccatctactggtggacattaagcctgcctttaatgtgctttttatacccagcaggactccattgggaaagggcaccccccagtttttacacagacaaaacttctgttttctcttgtgtgtctgtaaaatgaaattcctcctaacaacttggacaaggttttgttttatcagggctgacgcccaacaggttcctaatagtgaccccctacaaaatgacatgaaggacactacagaggcatggtggctccagtacattccctcttaatgtcttttgtatcctgggaaccaattcaagagaagttgaaaatatgacccacgggaagaaatatttgaggtgacaaaggttgaaagtgagtcctcctgagggtcagactatggctgtttacatcttcagcattaaaggatataaaacttcacaaaaccaaatgataaaaatgtaaaagacatgagctataaattcccaaatctaggtgatagatggggacaaaccagtgttagttactgatctgtgctaggaccactgaggaatacttaactgtatctgtgtgttcttgcctacactcatattgaatacacatttgggcccatgtaacaaactggtcaaatctaagttcatttccagacagttttggtgaaagaaaaagagttaccaatcttgacagggcaatgacaagaagggtccgtctattcagaactgactccacttgagaattctactaaatccctaactttaaaattgaaggtgcactctactttgttgccctttctagagcacaaagtgggcataataatgttcattctcatacagaaaacataagggaacactaatgtccctgtgagaacactaatgtactatactacttaaagataaaaccaaaccaggctcaacaggtaaaggcacttgctgccacacctaagttggctctcccatcatgaaaggagaaaaaccaactagtgagttgccctctgaactcaacaaacacccatggcatgcacatacatacacacacacacacacacacacacacacacacacacacacagagagagagagagagagagagagagagagagagagagagagagagagaataaaaacaataaaactaataatccttaatgatatactaaccaatacacaattcaaagagtaagagagccttggcgttttattttctcttatttgaagactcttcagagtctcaatgcaagaaagttagctataaggttaaaaacaaagtcactcaatttctgatccatttttttcatgctatagaaaccatgggaggacctcagtaactttaaattctgcctgttgactcttgagtagttaagcttttgcagtattagaaagatttagaaaaaaattctttatgagataaagggatttaattatcatccactaaatatttgcgatgtaagccagaattttaagttttccaatatgttaaatcctctggggaaaaatgaaagctcaggcatgctgggattgaaggagcttctactgcccaatctttaacccctcaggaagtcctcggtgctcagcagggtggccttgcttatcagagaacactgctctccctcccaagtcttctcacctgccctcccagatctgactctttatcttttcacagctatctacacttctttacatttctcttcacaaacattgaactaccgcacgcaaagtaagacctctccagcgggtaggtcaaaaaagcccttttgggagtttcctaaacagtctcttcattaatttcttgagacatttatatttggaggaaggtggagagggagtgaactattaactccgatacttgcctttttacaagttgaaaccttctgaagtgtgtggtgaaggacaggtctctgcaactgttctatattgggagatgtaccccctgaaaggcagtcttggttccatgtccaggaaagccattactagagactccggaaggtggttgaggggttggcccatggcctggctgcaagctccagtgagtctgcgcactggtgctcatccctccacctgacggagggctgttgcccttgacaacccaggcggcctgaggagcttgaaaaccagctgagcgctagactctgtgccgctgcctctgatggctatgcagccaggtctagcgctgagagcaccatccaccgtgatctgtctcagtctgtgcctggaactgatagggtgaaccggatccttaggacttgagacaagtgaaatgtgaggtaatggcgtaccgctttacttttgctacgcgtcaaaatggacatggagtctggagaaaagagggtgaggagggaaagaagagggtgagcacatctccattctccgtcttttataccctctcatttcgacctttaaaaaacactttgtttctatttaggttttgagatgtgggatctcactatgttgccccgattgctcttgaattcctgggttgagcaattctcctgcctcagtctcacaattaactcccagtagctattcattctcacccatacattctagatttcatctagcgctgagtccccatatatgaatgtaccatgaagtgaggtggaaagtaaaatatttaatatcactataacatcaagattacccaccgatcaccttaagtaaaatattcattaaaaatatcagtcagaaaagcagggatggaaagggggcagctggatgcatatggccaaggaattaagcaggactggtcatgaacatatggaaataaatttctgggtttctggggactcaaaggggatttgaactggtcttgaagatcaaaagttatagcacaccaagacagaaattgtgggcaaaatgttaagacaacaaactgggtgttagctaatttgtacaccagcaggctttccggaaaagttaggcttgtgagattggaatggccatgtgaggtggggaaggtgggcaggaaactgttcatgaaagaattgatgtgtcccctgaagattctagacttaattctcctctttttatttaaaaaaatcatttttgaggctggtgagataggtcagtggttatgagtcttgctgcttttgcagaggaccagagttcaattccaggcacccatatcaggaaattcacagctatctttaactccagctccaggggatccaatgccctcttccatggccatccaaacatacatgttaacacacaattttttaagtaaaaatttttaaatgtttacacacacacacacacacacacacacgcacgcacgcacgcacgcacgcacgcactccaatgttaaggaacattatggttgaggaagtaggaagattaaaattcagaagctgaaggtgaggctgtgaaacatcgtcttccggacataacatggttgatacactgaagaactcactacctcacctacacaagattggagccatcaactttttcatcatgagagaggaaagggctcaagaggcttcaacccaccctgagggactactgacagttaatgacatctgagggaaagggtatcactttcttcagtggtgtaacccagaatccaagaaataaccttccaggcatgctcatcaaggcaaccctatttaatgcagcaggtcagacacataaaaagacagaaaaactataaagggacttgttgctttcaataaagagttttggcagaagatggtagggagataagacaggatcatagggggtgagaaggactgaaattcattatacacatgaatggaactgcctaaaattaaaaattaattacttattaaagccattattcaattactttagctttatgtgaaaataataatgggttttatcttggctgaaaatgataaggataagtcatagacatgatctctctctaattgttccagaatatcagtgctagttttagcatgtgagagtcaggctaggaataacgactaaggaacttgtcctttacctgcttctaggttaatgatgggattattagaaaataaaaataaataagtgattatttattattttttacagaattagaatccttagttggcttgtagagcagccaaatctagtttttctttaaaagaaagaattctgactagttattcatatatttttttcttgccagaactaaactgagcatctttaaagaacatgcacacatacttttctaattagcatttttatgagttctccacttggatgactttactgtgtgcctcatcaagattacagagacactgaatattttactccccagcttaccacattctgcttcccctggaatgctacaaaagtgaataaacttatccatgcacacaaaatgactttttctgaaagtggcaattaacagcattcttgacattccattattcccctaaacaagttctgtagttctgtggatatctagtcacagaagagaaattaagtttggctgcctttaagtcccaactcttgattgcttcttggagacagtatctgaaatcacacagcttatttcagtcacattgtttctctactgttgcattaatagacattgagaaaataaattttagaaactaaagattcattaaaataatcaagtcattagatttgaactcacagcatcattttgtcaaaacggtcttctttcagaaaagatcaaggaaaaacatttacatgatcagtcatgtgtcatgacctttgttactgacttttgcatgtgtgtatgcatatatgcaaatatttatatgaccactaaatataaaagaagaggtcatgaattcaagagtgtgtcacagggcacaagaggaattgaagggaaaaggagaaatacaaattatgaaatatagtatattcacgtatgaaattctcaagtaaattttgaaagaagaaaatacaaaatatgactagcataagttgattgtgaatataaataaatcattgaagttttactgaaatttttctaatactattctccagttgacctttattctttatcatctagaaatgttgttaagtagtaaaggataacacgtgcaaaatatcagtatttcctcatcatagaggaaaatatcagtatttccttcattctggaggttgttattcaaaacaggtagatgtgcactaagggctgtgagagataaaagacagaaagaaaaaaaacttgtggcctctgagtttaggaagattgctgtcaagcactaagaatcagatgcctgagttttctctgagaaaaagtgtgtgtatgtgttttgtattcttttgtagaagtctggtaataaagatatcaccgaaggttagaaacaaattcaaacagcggaaatcctgaaagaatgggatgtggaaactcaaaaatatcttcagaaaatgttattgtcttaggggtgagtgtcatactttctcattactgagatcaagtatccccaaagtaactgaatgcaaaggggtttgttttggcagatcattcgtgagggatacagtccatcacggtggggaggaaatggcagaaggcaggggaggcatggtgataggaagaggaagctttggacttggtggtccacattgcatatgcattcaagaattggagagtgaacagcaagtggggataagctacaaatccccaatgcccacttctaacaactttctccagtgagactctacctcttaaagacctaacaacctcttcccaagcataccttcagccaggggccaagcattcaacatgtgatcctatggaaggcactacacactcaaaccacagcagtaagagttcactctgattgactaaattcagtgttttaaatattgccagtttttaaaagggtgaccttgtatctagaaagggaggtattttgaataactaagaggccaaagcttttttgaaaaccatgctgattgtctattgtagcttttgcctggtctcccagtccttcatgaacaagtgtgtgctgagacacaagcacttcaactgaatccccacccccaagggaatccagctgtatgaataattatcaaattttaaagtgggtttgtgtttgttagtttaaaagagatctatcgctgatttcttttcttcaccgcactcacgtttgtacagtaaggtgaacacacgcttctgttcagttataaaccctgagagattaaaatttacctagttctattaacaaacaccaagaagttaggaaaatcacactttcataaccagtgggagaaaactgttccacaggctttcctctgagttttcagaccatgcagactagctgcccaagctgttgcatggaagttcttagctctgtgatgacagaccactcagaatagagtgaaatacttaatctgctctccttaattcatctgattcatgtacatgctgccatcattttcagtctggttggttggttggttggttggttggttggttggttggttggttggttaatgggatggttggttggtgagtggggtggtataagtgagacttcctagaacccagtgataagctatgaattaataatcatttttttcagtaagaaaactttagcttgtccctcatgtaccaccagagctcttcagaagccttggcttgtccttcctggacagatgttatgtctggtacaaccagtaagaactccatagttaatgcatgactagcttgcttccatattttacaaagaagttaaatgtttattgaaactgtgttttccatacattccagttctaacagctctctcttcttacaggttatccagattatcattggcatctatcatgtactcatgtggtatttcctattgctattgtatatgggacaaattaaaggagtatttgggacttatgaacctttaacttacaaaatgggaactgctttatggggatttgctgtgagtagaacacatttgtgttgactttattaattcagtaaataatattgatttgtaggtgggaggaaccagtttctaaacaaggttttcaaggagaatcatataactcaatgccatttactgaattattcaaaatccagttccttctttcaacaaatctgcattgagcacctttaatataagagtaaatgacaaccacaatgtgaactatatccctagctatgtcaaagacaaagactcttaaccaccatgtccattatcatggttagtttttagatttgccattacctgcattctggtgtggtttctagacagttgttgggcagaaggaaaactcagagtatgggggatccatagaagtcaagggaagaatatatcacaagacataaaaaaaaaaagatcagtgttgggcattggtggtgcacgccttcaatcccagcacttgggaggcagaagcaggtgaatctctgtgagtttgaggccagcctggtctacggagtgagttccaggacagactccaaaacaatacagagaaaccctgttttgaaacccccccaaaaaaataaaaaacccagctctattgtcttttgttggtttgtcagtataaggtttgaaaactgtctcttgggcttttaaatatgttatccagtcataaacatgacaagtagtttcaataaaatgacatggaatcctgattggacttggtttaggggaatagaataagagctggggagaatttttatattttaatttactttttgataatcctaaacttgtgtacaatgcatttagttcatttctacctgactctctccctccagctcctcttgtagccccaccacatttccctttcaacttcatgtccttttttctattgtcttttactggtgtggggggtagacctggaataaaaagcaataaatgttatgagaatgtggcaattgtgtgcctgtgttagcaagagataacaaattttagtgaacaaagagctatggtcatgttccccaatgatggttctcaattagtcttaattttaaccccttagaaaacatgtcatagtatctgaagcagttctggatttttacatccttggcaaaagctaacgatgctgccaagcatcctataatgcacatcattttcaaagaattatagccagtctcataaacagtgcaaaggcaaggcaacaggagggaatgaacgaatgacagatcagatgtatcttgctaccatcccttcccacctcgatgaatgatgtgctaccatgccttcacactctaatgagctgtactccatctcaaactgtgagctaaaataaaccctttgtaattgagaaaaaacagagaacagaggtcagattttgatccgatttcggaagcttgtagacgatttcctacaaaagcttcaagtagctcaatgtaacagaaggaaagataggagctgaaagtgagggcaggcatgtggaccggccattaggagagaggcaagcgtgtgaagtggccatctgagaaaagtgagagcatgtcgtttatggaaaagtaaactgatctttatacagcattaaggactcaaggtttaggaacatgactgcatagggagatgaatctttattcaagacatggtcatctgaatggatgcaggaatacagcagtattaaaactatatttcatcaggatttgggctaaaaggctcaattttgattttttttaaagtgcactggagttgagaatggatataggccgtgtttttagtggctgaccatagaattgatgctggtgatgaaaagaatccaatagggagaagtgtgagagaagagatagagtggggaaaacattactagagcttaaccccagagggcacccactacagcaagtagtggtaagaatgactacatattgtgtgtggatttccccactttttttggggggggtatttggttaaagcctgcagaaacagtggacctgacctactgatagaatggagaccctagtcacaaagctggggaaacaacattggaccataccctctgaatgtgggtaccagctaggagtccaagacaggctatgggtcctctaacagtggagccagtctttatccctagagcacaaatggactttggaagcccattcccgatggagggatactattgtagcccagatacagcaaggagggcctagaccctcccccaaacaatatgacagacttttaaggtccttggtagaggacctcactatccctggggaggagtcgggggtgggttggggtgggttgggtggggaacatggaaggatgggagggtgagggaatgggggcatggatatgtaaatatgagtaattaaaaataatacaaaaatgaaaagcaaaaaaaaaaaaaagaatgactacataacactgagatttcaaagggccaaccaacaaagacaagaggatgggtatggaaatcaagtgatttttataaaggatttgaagggggaaattcaaagaatcagaaggatgtgcacacataaatcactaagaattaaatgatttaggagagacttcaggagttcaaataatgaaaatcatctagaaagggatgaatgacaaagcagtcagtgggtgatctcaagcacaggggtggtggatgacatcatctgaaacacgagtctcaaatcttagaggaagaaaatcatggtggaaatagacaatggaacaacaaaaaacccaccgtcttgtactggaacaaagacggtcccctggctatcacagaagaggctgagtagtcactaaaagaaacagtgaccttgaagacatctgcctttacccacatgctgactcggtgtccaaagacaaaattctcactaagccaggttgataagcaatccactgcctcgtcaacacataaaggtgcatttggctcattaatgaaaagcacgtggaagaaagaagaaaataaaaagacaaggtaacaaaacagaattttcagacaaaactcagagaaatgatttgtgtttcatttcatactataaaaataacttcagggggactagagaggcagctcagttagaagagtttgctgcacaagtgtggaaatctgagctccactcctagaaccatgttttctgcgtgcttttactgtgctgcttttggtatggtgttttattttgtttgtccttttgtttggggtagcatttttgcttatataattgcttccctgcttgttttgagaaagaaaaaaagaacgtcaagttgtatgaaaagtttttaatatgatttctaaaacatagctgttactccccaaataattaacctctactaaaatcaccaaaatagaaaagacaaaggctgcagagatggttcagtggtttagagccctggctgctcttgcagaggaccaaggtttggttcccagaacccacaccaggggattcacaacttcttgtaacttgagttccaagagatctgataactgcttctaacctctgcaggaactgcaggtacacatacttacatataaataaaaataagtaaaacttaaaaataaaacagtcaggctgtttctgggaagttgtgtagcctgctttcaaatagcacagcattgtacttcttggaaaatagaaatcctgaaggaaataatggaatttcttttaaaataatttttatagaaggcaagacagctggaaaggtaactcagtgaataagaatacttgccctgcatgccattgtgaagatctgagttcaaatccctagaacataaaaagtcaggcatggctggacatagcagtaacaacagcagtgaggggtagagacagccaaattccaagtactcagtggtcagccagtctagctgaaacacaaaacttccagttcattgagaaaccctgtttcaaggcaataaggtggggaacaataaaagaaaatgtatgattagatgtatgtactacagcacactcactcacatgcatactgcacacatacaccacacatgcacgcatccataaatagataaagtgaaaggcatcctgtagccttaatggtgactattgcctctcaatgaaaaggctattttttacagccatggtgtctaagggatttatgacacatttttcacatctgaatgtgtacacagtccttacagtccatggtatctcactaggaacaaaagaaattggagttgcacctaaatggattaataagagtatcatataaccaaacttggtccctgcttcaggcaggattaagaggccattgcctaaatcctgtccactgtcccatacttacacctgttgtgacactcctattactttcaatacctgtcaccttttgaaaacatgattatctcataatggaaactcatccctaccctttctaccaaaacttctctctttgttactattagttttatgaaaatcttgtccttaaagatagttgttttaacattgcttaaattactgagtattatcaatgagttttaaccaatatatattttgtgtatagtttatcatttcaggagccttcacagtaaaatcagcaaaacgtcccagtagatatttggtaagttaaaatgtttgggatgtgtctagtatgaactttctcaaaacaaaaaaaaaaaagaggtttgaatgaaaagatagcgttgggattggagaaatggctcagcaattaagggcacttgttgcttatacaaaagactagagttcagttcccagcacccatgttgactcacaatttccaataactccaagagatctggctctctctacaggcatctgaaggcaactgcactcacagggactctctctctctctctctctctctctctctctctctctctctttctctctctctttctctctctctctctctctctctctctctctctctctctctcttctctctctcctccctccctcctctctctctctctttaaaataaagaaaagtagtctctaaacaataaaggaatctaccatccgtataaaataagtgaggaaaataaattaaaaaccagagatcagattacctaatgtagaacagatacatttgatcattaacttctaaatttaaataataattttgcttggatgttctatccttaacattgtatgactactttgattaaaacttgtttacaggatctaaactccttctctgtgaacattactgtgctttaatcttcattttctggtctactcacattgggaatagggttgtaccttgtatcaaagtagggaattttctaaaaaaaaaaaaaaatcatccataatgtaggtggaaaatatttagaaataaaaatgtcagaattttagacctgaaagacagcttagaaatcaattaatctaatcttaaatgtttacacatcaagaaatctggggatcgatggatggtttgggagttaagagcacttgctaagtgctaagagcacttaacctaagaggactcaggttcaatccccagcacaaacatagtggctcagagccatcataactcaaatccaaggggatctgaccttctcttctgtccgccatagcatgtatgtgatacactgcttgtatgtgatacactgacatgcatccggaaaagactccaataaacataaaataaaataaaataaaaaacccttatgcttatccaaagatgttgacagatggtcccagctaataaaaacccaggattcaaacagattgactctcatttgactttatttctgcagtcaccatttcccatcaattttctttacttgttttaaatatttcagtcaaacatcttgatctttcttccagctgactcacaagattataaaatacaaaacttttgaggattggtgaaatttaaaacttggtggcatctgataatggagtcatgtttcccctacattaactagatttcatgcaagccaagaaatggcaagcataaacacactttgggagctttgcaaactataaggaaattttgactcaattgttttctagtaaaacaaagcaacaacaaaaacatccaaaaaaaaaaaaaaagtacttcttctgaatgttttaagttactccatgtgtccttttcagcttgaatgcgccctgtccctgaacatactctgcatgattgttacaatcattgcagccagcctgacaatagtggaattggctaacttccattctgtgtcatataagaattatggacaagcagtaagtaactgatttttataaaaacagctttctttttatgtttgtgacattttattctttgagagtttcatacaatatagtttgatcatattcaccatccacttttctgccaactccattcagatctaaccccatttccctatcctaatttaatttctgttttctatttatttcaataatcatagatgtctattttgtgctgcccttacactcacaggtgtgaggccatccactggtgtgtgactgatctacctaggactatacccttaaagaaaactgattttccttgcccagaaactgtcaactgtcaatggtccctcagtcagggctggagactcccgagctgcctctccctagcctcttccatgctagaatgttgattggtttgaccttgtgtgcatcttgtgcaggaaaatacaggtgctgtgagtttttgagtccagcagccctggcttgtccagaagacacagacactatttcatgatggtcctctgtggtttatggctcttaacaagctctttgcctcctcttcccaagatggcccctgagcgttctctctctctgtatgtctctctctctctctctctctctctctctctctctctctctctgtgtgtgtgtgtgtgtgtgtgtgtgtgtgtgtgtgtgtgtgtgtgcgtgtgcgcacgcgcgtgttgcgtgtgttgcatgtgtatatgtgaaggccaaagaatagccttgcgtatcatttctcaggcactgtacatttttgattttgtaacagtatcattaaccccaaagtccctaagtagggtaggctagctggctaaaaccacaaacatcaacctgtttctgtcttcccagcacagactgtacaccctcattttccccccatgacctcacctctctctctctctctctctctctctctaggttctggaaatttatctcaaattcttgtgcctgcaaggcaagaactttactaagtgagttatcccccagtctctccacagatgacatcttaatgcaaaaagagttcattcctggaccactaagccattcaccaaccaggaagagagctttgatgttgctcaaatgtgtttaaacaatgcatacctaatcgtttctgacctcacaaaggactttcataacagcctgcctttgcatcttatgtagattttgctttacctcctcgatgctaaatgcaagtcagtgtcagtcttgtttctttgtacccgagacttgattacatagaagtgaagcacatcatactatagcaaacatgaatagccttgttgataaaatacaatagatttgcttgagtcgtgttggcttggaattaagaatcatcagaagatagagaaacctcccatgctcgtagatcagtaggattatcatagtaaaaatagccatcctatccacaagagtctacagattcgacacaattcccataaaaatcacaaaacaattctttacagaccttgaaaggacaattcttaacttcatacagaaaagaacaaaaagtctaagataactaaaacaatcctggacaataaaagaacttctggaggtatcaccatccttgatttcaagttgtacaacagggatatagtaataagaaccacatggtattggcataaaaacaaacaccattgaattgaagatccaaatgtaaatccacacacctgtgcttttttttttataaagaaaccagaaattcacaatggaaaaactaaggaatctttaagaaatggtgctggtgtagctagatatctacatgtagaagaatacaaatagatccatatttatcatccagcacaaaattcaagtctaagagtatcaaagacctcagcataaaaccagatacactgaatctagtagaaaatggggggatagactcgagcacattggcctagaaaacaactttctaaacagaacagccatactgcaggcactaagatcaacaattaataaacatgacctcatgaaactaaaatgctcctggaccacaaaagacattgacaatagacaaaacagcagaatgggaaaagattttcatcaactccacatccaatagagagctagtatccaaaatagataagaactcaagaaactagacatcaacaaaccaaacaatccagtttaaaaatggggtacagatctaaacagagaagtctcaaaagaggaatctcaaatggctgagaatcactaaaataaatattcaacatcctagccatcaaggaaatgcaaatcaaaactactttgaaattccatcttacacagtgacagttcatgccggagagaatgtggagtaaggggaacactactccattgctggtggaagtgcaaacttgtaacaccactatgaaaatcaatatggcagttcctcagaaaattgggaatcgatctacctcaagatctagttacatcactattgggtattatgttgttttgaacgaaaatggcccccaaagggagtagcactactgaagaagtgtggctttgttagaggaagtgtgtcactgtggaggcaggcttcaaggtcttatatatattgaagacacacccagtgagacagaccacttcctattgcctgcaagtcaagatgtaggacactaggctacttctccaacactatgtctgcctacatgccaccatgtcacaccatgatgataatggactaaacctttgaaaatataagccaccgcaattacatgtttttcctttgtaagagtttcctgctatggtcatggtgtctcttcacagcaataggaaccctaaataagacaggcaaatatccaaaggatgttccaccctaccacaaggacgcttgctcaactatgttcatgatggctttatttataatagccagaaactggaaacaaactagatgtccctcaactgaagaatggataaagaaaatgtggtatatttacacaatagtgtattactcagatgttaaaaataaataacatcatgaaaattgcaggcaaatgggtgggactagaaaaaaatcatcctgagttaggtaacccagacccagaaagacaaatatggtatgtattcacttataagtggaacttagctataaagtaaataataatcaaactataatccacagacccacagaggttaggttaaaaggcgagctctaggtgggatgcatggatctccctaagaaagggaaatagaatagattttttgagtagactgggagaaggaggggtcaggtggaagtggaaggagacagacagctggaattgatgggaggccctggaaacttcctggaatctatgaaagtgactagtgaggaccctaataatggaggaaatggagtctgaactggccatcgttttgtagccaggcaaggcttctagtggtgagactgggttatatctggttgagttgttggccaaggcagtcccgtggagatccctaaacaacccaaaccgatgctaggacagaggtttgttctctgaagacttccgggaggggggggggttcccattgctaaggacaacatccacactgctcattgaaagtagagaggttgagccagtgcctacatgaaacctttactcctatattgttctagtctctttggtatgggaaggtacttataaaccaaggtttctctgccctgcctggtccctattttaaaataatcactcagaggcttaatattaattacaaattgtttggcctattgttcaggcttattactaactagatcttacaatttaatttaacctatttctattagtctatacattgccatgtggtccatgtcttaccaattctctgacatcttatcccttgagcgactggatagcatctgcccagactcctcccttcttatcctgtatctctgcttggatttcctgcctggctctattctgcctggccataggccaaatcattattttcaaagtagaaagaaaatgaagcaataccaagttcagctgtacctgattgttattacatctgtcacagagttaccatgccaacctcctttgcacaggctcctgatttcttgctcctaactgcccacagtttgctttcctcataatcatattaaattagataaattaaaatctaagcaaaactaattttgcataatgtttcagttcatttgtgcagagtctccaaaaccctctacggtttctctctaggcatccaagtagctaattatttaccctcccgccagcctccaaggcacttctggtcctatttttagaacagagaatgattacatttgattaataggcaaaacagcacccacagctttcctgagataacatgaaaaggtccatctatgcaaaatagactgcaattcaggctctgcagattcccctggatcctgaaataatgtgtactggagcataggtgcatggtcattatgcccccagatttcctcatttaggaaatcaattctcaaatgttgaggatatgcaaattcaattatttgaattcaatttgaactgcagaatgataatgatgttttgagaatatgttgtcatacctgcatggagcagactactcccctgggtgccttgccatctgttgaactactctggcctcatctcgggacatccatcatggtccacatatgacaggcacagagtaacttaatctgttgttggaggaagctgtgaagtcacaagagagagtcagatcttagcagaaaaccacagtgagaagacaagagctagaacaatgctcagtcagacagtcactaaatattctataacagcacaccttgacaaaaaaaaatgaaatctaattaagaagtttcttttctggattataggaatcctttcaatgatagaaacagctcttaactgtatggtgctcactgtgcaagcacttagaatttcagttccttctattgttctttttaaatacttctgaaccacaaggaagttctgttgttatggttctaaaagaggagaaattcattcaattatccatttgattttaaactattcacagaaaaaaacccacaaattttgttgtacttcatcattccttcactgacttggaatcttccaaacaggacgttaattgttataagcacagatggcagaagaattggtcacagtaacatagacacaaacataaattactacatagataggtagataataggcagctatatataacacatgcatattaatatgtagatatatgacagatacatacattaatacatagatgacatatacatatatataataagcataaataatatagaacacaaattcatgcatacattcattcatatacagccaaagggctcaacaatgccaaagcctgtgatatatactctgtgtttaatgcacattcatcataagtattacactgttgcgtggtcagctcactatggatgggatgacaacaatattagatgacttagaaggtgtcccaaacaaagtcacataactcagatcctgaaaaccgtatcagagtaaatgagaggtaagctttgtgggaactggtgtctaacagtgcaggcaagctgggagaaacagcaccgttgaagactgcagtgggcagagccagatcatggaaagcctctgtacggggcaactcagatcttgaagggtgtgtagtgatgagaaaggaggagaggagaaatgaaggtcctgaccaagctgatgcagctagctgctggacatctaggaaagttctctgataagaacaaaacacaatggcctcccagttgatggatctgagctgaggtcaataaagtcaacctttaccagaaaaagaaatcagattcacaaatattactgctgtcaaagaaaactccccatgattaagctagcatgttggtggctgcctgtccccaaagcactctagtaagcaaggcagcaagaacaagagttttaagtcatcccaaggtgcacagaaaattccaggacagcttgggctacatgaaaccctgtctcaagaggcaaaagcatgtatgggggctagagaggtggctcggtggttaagagaacctctagtttggttcctagcatctttgttgggtgactcacaaccaggatattatgagctccccttcacctacaaggaatctgaggccctctttctacctcagatagcatctgaacatgagcttgcatacacacaacacatacatataaataaaataaatcttttagaatatattttaatgaaaatagaatttcatcatttccctctttcccttttctcccccccctccccgtgccccaactccctttcaaactaatggtctctttttcttttattattactgttacatatagaaaaacgatgcacaaatacataaatacaacctgctgttgtatttatttcttgttatttgtgtgtatataatttcatggctggccactttgtatttgtataaccaattaaggagcttatctctgaaagaagctaattctctatctatctctcgctctcttgctctctctctctctctctctctctctctctctctctctctctctctctctctctctctctctctctctccagtcattagctgtctgtagttctttgtctggggtgggaacctatgagatttcattcttctgtattagcacatctattggcattggtattgttcatatcttgtttaggcagtcatttctgggagagtctattacccagactttctagtcctctggctcttactatctttctaccccatcttcctcagccttaggtgcagaacttgtgttgtagatgtattcactggggctgaacttcccatgatccattgatctctgcattgtatcaagttgtggttttctgtgatggtctccatttgctatgaagagaagattttttgatgaagagtggtagctacacttaaaagtgggcataaggatacactttagaatgtagttaggaattatgctggtctagtaaagtgatggtagtaggttctcttgtaagatccataatctcactagccctggccaagttgtattgaggctagctcagtcggtagagcatgagactcttaatctcagggtcatgggttcgggccccatgttgggcaccagttattgtgataaataactgatacaaaatccgtaaggttaagataacttttaatagataaacgccagtcaacagcaagcaagagtgtgttaaatcagcaaggcaagagagcacccatgtgccttgtctgtccctttaaacctctcccatgccatcctgacttcactttcaccacaccctgatgggtgtggtcggacacacctgtagccacaccttaggaggtgtggttacagtgtctccctacaaagttgactaggtttcaggtaacaggcatggtttccattgagtaggctttaaggccaattagagagctgttggtgccaacatgtatgccactattgcacctttaaggatatcttgccatgttggtcgccattattgttcatagttatcacagctagacaagaaaattcatagtgttccccccaccccatggcagctcacacaggaatttttggtgctatgaaagccactctacaagacagaggctttctggttagcctaacttacttaataacctgaatccaaatgtgtttcctaacaagtactaaatgtgtggtaaccttagtaacagagtcttacctacaacctctgaggggcaaccaagggcttggggctgggagctgggaagataacttgatggttaaagtgcttgtcatgcaagtgtatatatgaggtcagatccctggaacccacataaatgccaggtgggcctagcagcctacctgtaattccagcctggaaggcagagtcaggtaatccccacaataaactggctagcaagaccagccacatcagagagtttgagtttgagaggtcctgtctcctttaataaggtggaaaaacaattgagattgattcctaagataatctcagaaaggcttccacaacacccacacatatgcacgttttcagaatgcatacacacacaacacacacacatacacacacatgaaatgaggcaaaaaaataataataattttttaatctgggctttcctcacaacctgatgacctaaattcaatcctggaacccacagaggaaggagaacttggaagttgtcctctgacctccagatgagcagcatagcatgcatgtacccagatacacacacacacacacacacacacacacacacacacacacacacacacacacaccatgatgatgatgatgatggtgatgataaaaccagattaactgaagagtttagatggtgaataccttcatgagactaaaaagttgtagaaaagctcagtgatcatgacaaaggacagacgccacagacaaacagctgggaagaatgaaaatatgatgaatgaaactggaagcaaacagttagaaatgcccaggaaaatcaaacatgggaagaaggtctcctgctccaatgttcctcctcctctttgactcttactctggggtcttcttgggaagggggacacacactacagataatgatacatcatctccctctgtttcctggttacagaagctggggagagaagtgtcccgtatcttgctgatctcttacccactggaatttgcgatggccctcacatatgcaatctacagttgttcacatttggtaagtgtttcctatggcaattcaggggtttttggtttctagtaagcaaacctaaggagacaactgtctggaactaatagcaaagtaatatgtgatatttcctttaccttttgttttcttttgccataaattatgggtataaagcaaaatgacaagagtaacatatgaaactgtaaatttaaaattaaaaacatatgtatacatatatatatatatatacatacaatacatacatgcatggtgattctccccttaacattgctctcagcatgtccacacattcaaattaagcacacacgtacatacacacaaagttacagaacacacattgcatccacagtaggaagtagaaagaggtgaatggtgatgctctggaggctggcttgcttcctttataagatccaggacctcagcccccagcatggtaccacccacattcagggctaaccctctctgaaaacaccaacttacaaaaatacccaacagagtgttccctagttgattctaaattccagcactgcaaattaggatcaaccggtggacccccattcctcaagtcctttaactcaattgtaaagaactttaccaaacaagaaaatttattttctcacagttgtagtccagaagtcaagaccaaaatgctgtgggattagtgtcctctaaagcccctcccgctctcgttggctttcagtgtgttcacctggcctccttttggatgagtctgtgtcctgatctcttctacatataccagtcatgttgaacaacagcccagccccccaaaaaaaacatttttatgattccattgcccctttaacgaccttatctccaaatattttcacattccaatatgccagtggcggggattctgatgtacaagttttgaggattgtaattcagaccacaacaaagtatttttagtatctcctctgcctataatgaccagctgagtaatttgctagccctgcggagtagactagaaaatagctttaaaagaactaggaattagaaatcaatgaaaatgtgtggatagatcagaggcaagccccaaaggaaatagactccatgtcattagcataaacaagtctctataaagaaagcagcatccaccactcccaggaagtgatgaaactattaaaatcagtgcttctcaacctgtgaatctcgaccctttcatcagggtcgatcatcaggaccatcagaaaacacagatgtttacattatgattcataacagtagcaaaattacaattatgaagtaacaacaaaaattattttatggttgggagtcaccacaacatgagtaactgtattaaaagttcatagcattaggaaggctgaaaaccactgatttaaattatctgacatttatctaaagtatctaacaattctttaagatgtccaatctcaaaaaaaacagcagaaatacagggaacaaaaaataattacatgtgtggtggcttggctgaaaatggccctcataggctcataggctcataggcagtggcactattaggtgtggccttgttgaagcagggatggccttgttggggtaggtgtggtcttattggaagaagtgtgtcactgagggtgggctttgaattttcacatgcacaaggcaggcccagtggtactctcttttcctgttgcctgctgatccagatatagaactcttagctctttctccaacaccatgtctgcctgctttccaccatgatgataatgaactaaaccaagccagccccaattaaatgttttcctttataagagttgtcatggtcatggtatttcttcttaatagaaacttggaaacatataacttgtaaagaacactcaggacctgtactcttggtggaaatggagaacaaaggtgaaaaaaaaaaaagacagacttcaaaaactgaagggcatgtatataatgggtgacaacaatgactcgttatataagatgatcagacaaaaacagaatttataaaagaggaagttgaatcctgggatttaagtgtaagcatgctatatcagaaatatagataaatacactcatatctgtccacaatgtcagaatttattggataaaataaattcacgaggaatggtaatttcattaacagcactggctgcttttccacatgtcccagattcaattcccagcacccacatggcagctcacatggccctcctgttccagggacctaatgccctcttctggcctcctcaggcaccaggcactcaagtggtgaacaaacacacatgcaggtaaaacaaccacacacataaaaatatcagcaaatatatcaaaagttaggatttagaggcattaaaagaaggtaggttggattgagaatgagacagaaagagaacaaatgacactctagattgtatgccgtaagtaccaatgtggcctgtgttctctattactattttaattctctgttactcacaggatttgaagcactgggtgtcatctgtaagtggctgtctttttctattccagggaagaagacaagaagaaagtttagaaactgtttctgatgccatagacggcaaattctgaaagctggagacatgaacagctttcctggctgctgacacctgatgtatgtgccaatgatacttccgtacagcaaggttgctgcgcaatgcatgcaattttatgcaagaggaaattcacaacaggttaaaagttattcccctgatatttaaggaatgtctacacacatatcatctaggtttcagaggggaaaacttttcctatgtaagcaagagattatcacaaggaacatctgctagttaaccactctgaaaagctgtcaactctcccagatcatctgcactagaccataaaacccacttgtaaccagtagagtgcatgctatgaaatttggactacaatctgtaagtgaaaagttcgttccaccacatcctgcattattcttctcaagctagcttctacctccacaaagcaaggatcaaaaggttaccagttcggtgcctttattgtcccatggcttttcctgtcctcattaaagttcctttctgccctgtatgtctctgctgcctttttccccctctcattcccctgcttccttcttcccattatttgagtcgatgttcaatccattgcaaagcaaactacttttccatgttgaggaacatttcccaggaagctattctgcatgcagtttgcctgttttttctaacgtgaacatggcatcagagaagtttcctcatcaatgcaagcaacactgaggaacaccagtgtttttacatcattcaaggcattacactggtggttctccatgactgtcaattaaggtttcttgtttctacaaatttcagtgcttagctcatttctggatgtctactgtgcccaaagaaatgattaaaacctggggtttaagagattgatgaggcatctcaggcagttcttattttagcagaagaacaagcagctaagaaatcataactatgagcaattttcgtattaagagtcatataaaaactgggagtatgacagaacagagaatgctctttctggtgtaaagatgataatattttgtgaaaactccaatcaagagattagtatttgggggggtcttgaaaggtgggaggacatttcaaatgaaagaactagagtggcaattcatctacagaagaggaaggggagaggggaggagagggggaagaggaagaagaagacagaaaagaagaagcaagccggcattggtggcgcatgcctttaatctcagcactcgggaggcagaggcaggcggatctctgtgagttcgagaccagtctggtctacagagtgagttccaggataggctccaaagccacagagaaaccctatctcaaaaaaccaagaaaagaaagaaagagagagagagagagagagagagagagagagagagagagagagaggaggaaggaaggaaggaaggaaggaaggaaggaaggaaggagcaagagtaggaggaaggtgaagaagagggaggaaaggaagaaaacagaaaagaggagagaggtgaaggaagagggggagaagaaggaagaggaggaagaaaagagaaggaagactgagaatgtcatccatgaccacaatacatttgaccatattacccccctgctcactactccatggttctcttccttatatcctcctctcaaattcatatcctctgtttttaaaaatgtataacctactgagttcaactagtgttacccagatatacataggtgtggggctgaccactagagcataagcaacctaccagtgcccccatccctgataaaattgtctctctctctccccaaacagatgttggctgcctgtatcttctcaagtaggagtagagccctgtgaacctttcagccattcattccgaaatgttggcaggtttggtcttgtgagtcttaacacaggttaccacagacatagaaaggtcatgggtacaacattgctgttatgcctaaaagccactgttttgcagcaattctcctgattctgtgtggacaagggaaagcccaggaggtctcaaccctacgcagagaactacaggcaactaaggaatccaataccaaatggtcagccctaaaaacacacatacaagtaagagtgcacacactgagcaggttatatttaggaacacacatacacacacacacacacacacacacacacacacacttaggaacatatgtgtatgtgtacatatatgcatgtaacaacaattaatttaaaaagaggctatgacagactttgttgactcctcaaggaaggccgtatcccatatgaggagtggattggggcaaggggaagaggggagacgggggcaggaaaagggaagggggagggaactggggttgttatataaaattaaaaataataatttttaaataaaattttaaaagattccatgaattttaaagagaacaggagggttttgagaaaggaaatggggaaatggtgtaattatattataatctcaaaaataaaagagacaaagaaaatgaagaaattgaggccaaacaaacaaacaagtcattagaaaggttggaaaacctgaaagaagggagtggtctacaagaccatggaagacagaaaacagccttatttattagattatactaaaaacccatgtatatatatttaaattgtcccagtagccacacaaagagagtaaatagaaatatatgtgcttaattttgttaacacagtctaactaaataaatcaaaaatacctagatggtgcaagtaaaaataatcagtgacatactttataattgtttaatcatatggagtcttcagaattgtgtgtgcatgttgtaccttaaacatatgtcaatccaagccaactacatgacaaatgctccatagccatatatagctacttgtttgttaagttgtgggggtccagaaacttccataaaagtcataaaacctgtaccctccattctcatacccaagagctcctggttccagaaagtgagcaggctttttgcaaaggagttcctccagaggcaaattcagtaatgggccaagaaagctgaggctgtacaagggtctgtgcatgacaaaacggatattccagagatcacagttggaggtcttgttgctcctttgttatctcaattggctttgggtttccatcacttcacagtcggcccatcgttacatactcgttattttatcttaaaacgattcccttgctctactctacagtgatacattatttatgatttattaaaggttgcctggggattcagaaagcaaagctgcctcaagctgtagagatcaggcagtggtggtacacacctttaatcccaggactcaggagaaaggcagatagatctctgagtccaagaccaagattcactctaacctagagtgaatcagagctcatacctttaatcccaggatttgagagttataaaaggtagagccattcagtctgacagtcagtctctagccacatagcagtctgggtgaatctgaggagcagtgaaatagggagcagtttgagggttgcccctttggtctgagctgaggtagaggtaaaagctagtggatgactgctttgattttctgatcttcagctagatccctgatatctgtctctgggtcttttatttactatgctacagtactccctctgtacatgattattaaaaccaaagttccagaggtcgggatgtattatctccaaattgtcacctcttgttttcccttgattccactctatgtcgagtctggcctccacctgtcctttgagtatctgtttcaatgacagcagtcacctccatattgcaaaatccagcaaacaaatatacaatcctcggaagatttaggcatcattttacattttctcctagagttctagcatctgcagggacctctttctgtatgttccttacctcctaagcctgccccttacctcctaaggcctctccttatctcctaagcctgccccttacctcctaagccctctccttacttcctaaacctgctcctcacctcctaagttgggttctatttgtctgacctcctaacattaaaatggatcatctctcactcaggccataatggcacacacctttaatgccagcactcagaaggcagaggcaggcagatctctgtgaattggaggccagcctggtctacaaagctacacagagaaaccctgtctctaaaaataaaaaaataaaataaaataaaaataaaaagggatcatgtctcatctcagcaagtaaattccacttcttactcccagtaaatagtgccattcatatgtatcctcaaaagtactttgtcccatgaattatataatccacaaaatacctgatactagaagcctcaacaaattgcctgtgaggaacactcctttagttagcaggcaagcaaatcggctttgcttttgagactcactatagtctgagttggagtgaatgacctttcatttacttacttctactgggtgccagacatagtaccctttcactacacattcagtgggtggggacccatatcataaataacacttggcctcaaaaacatgactatcaagttaggattctctaatacgcattatttaggactagattacagcagtagctttttccatagttaatttattttttgtttggttgatagtttcatattatctataatggattttagtcattgtatcccccccccattcctctcagcttcctccggatcccttctcaacgagttcccctccagcctccatctccatgtctctctctctctctctctctctctctctctctctctctctctctctctctctctctctctctctctctctctgtgtgtgtgtgtgtgtgtgtgtgtgtgtgtgtgttgcccattgagtttagttagagtttcttgtcccagggtggatgacagattcgtgcaatatagtgtccttccagagtctagaatctagactttgaggagactcactatagaaagacttgcttctatctgtctactggaaaagagcaggaggcatttgctcggtagggaaggacagagcagagaatcggccaggagttgggctcaggcattctgcaggttaaaggctagagtgtgctcaccacggagaagtaaagagtgtccacactagactccctcccgctggccccatccctaaccccatctttatctgtgggccttgaaggctgggtggaacctccacaggccggcagaatgcccgtctgcgtggccctcctcgcgtggagcctttcgcggttgctctgggacacaaccgcagcagccagcagcgttggatccacaagaggtaatgagggacacacggagatagcatcgccactgaggcaggtgttgtctgcatgaatcccagagcaggaagatctagacctaaaggaaacccctgaaggattgcctccttctacccttaggatcatgacagcgtagggaaaccatgacctttgaacagaccacattaatgactggcgttggacactacttactggtgagttttaattgtgtactagcttttttcctccccaatacaaccctacaggggattcttgtcgctgataagagactttgatggagttcatttcatttttaaaaggtcacctcgtaacgggtaagtttttaactcaagcatcttctaaaattctttttgctgtgcctttgtgtattttctccttgtaaaatgtcaatggcacattagtatggcaactgaaaccagagtttgtggcttatttgaggagaaggaaaagtttgtaaatgaaagatctaaagacaatatgctgaattttagatatgactatacacagtggtagcaggaaaagggaaaagattggtcagacattagagactgggatggctgtgggggttaaggggtagggatggggaggaggattgtcaaagccatgtctaactagaaagccactcaaaaaatgtactaatcttttggctgaaaagaaaacattatctcctatttcctttaacaaaattaaaacgagtatttatataatatatatgcagccagacttccaaaataatgaaattaagaggttgaagatggtcaaaaggtgatttattctgttctttttccatctctgattttctctggatgcccaaagttttgtccacgccagttctgtcctttagaatgggtacaacctaataacaccatggcttctagcatttacatcttctcaatcaaactctgccagatcatcagagaaagagtttttcctgtgacccccccccaactaagtgacttagatatccacctttattcagaccagctaggatcaaagaacaattgtcatgggtattaaatacagaagctggttctggggcctgtgactcctacaaaataggaacagttgccctccctatcaatgctggaaatgatgagttatccttgtcttgcatagtgaacacccctgcccacggttgtcttgttcactaacttaagaagcctacctataatattctaggccttctctgcacctagtgtgacacagatccttccactcaggtacccctgacatatacttgaacttagatggcaccgatggtaagtaatagactaaatcaaagctatcaagagtctaaacttcctgatgctgcaactcgagcatatgagtgggtactagatggactgatgtgattggagcagctatcattaggtacttaccaaacttaactcaaatttgatacatgagcaaaacttactgggagacaaaaaaaaatagttttatcaagatactactagtctggtgcaaaagcatttgttagggaacaatcaagtatcttttaaaaaatgaactggattctccctcaggaattcccccttacgaatcttactcaagagaaaaagaataatcgctaactgacttaatttatattgatttttgtccacatttttcataggagatatcctcatatccctctgatgaacatgccacagaatcgtctatgggtaaaaaaggaactgaggttgttgggggtaagaacaaaaggccgcttgagtgagtaagtcaactgtgagagggttgccactccttaacacatgaggtaggagacctgaaccacctctgtatctactgtgaattcttcaaaaggaggcgaatcagttacaatggcttctgatggtgacatggcatcaaaacatatactgagtctggacatggagaaaaaatattctttttttttttaaccatctatcagttatttcaatcccaagatgagcgaattgcccgaagaagctgcaaactacaaattatgaacagtggctggttacaaaggtgctatgctgttcacattacctcacagacacaccactgtttgcaatccggtccaccacacacattggctgtgcaattgtgcactgcccattcatactgctgaatgaaagagccaggttaaaagttaaacacaaagaattaaaaattaggtgaaaaaaatcctaaacaatcaatacatgcatacaaagacacacagacacacaaacacacacacacacacacacacacacacacacacacacacacacacacgtgggcacaggggatctagaaatacatatattgaagaaaccatatataacacttgtattttaaaaatgactaaatactaatgaaaaattcaaattaggttacatgaataaaaagacacattcatggattacaaagctcaacatagtaaaaaatgttagttctccttaaattgacatatgggtttggcataattcctattaaaatcctaacaagacccgtagataactataaattaccaaagattatgtggtaaggagaagaaacaaaaacaactaaagcaaggtagtagaaatcacactagttgatttttaaaatactgtctgcctacagtcaagatttttttttttaaataagagcaaaacacacacttcaaaactagactctacagatacagccaactgatctggggaacaggaattgtttatttgtgttttgggtaagatgtctgtgtggcacaggggggactcaaactactaatcctgcttcctcagtccaccaaagaccattgcaggtatgaaccataagttgttttgttttgttttttgtttttcataaaagaactcaatgggtagtttcacagaagaataacaaatagagatcaagtggaaatagaaacaatgagccttaatagactcccaaccttttgagaaattagatgaatatttaaaaagctatgagaaacagatgcataatcaccaggagttacgggtgtcagtgggaaagttacaagaaaaggtggaattttgagatatctctgtagtgacaggataggtctgtgacttgattatggttgataaaacatgacaaaacagcctagaacaatagacagagcatcatagcacagttgatgtcctcattctaaagttctgtaaactgtcactatcatggtagagcaccacctttcttcttcatcctggcatctgtcttgaggttgttcctttttagaagttagctggaaccatgactaagaatggtatccttttctttcagtctatacaactgatgactagcctgatcatacagagcctgggatactactggacattcctatatttctctcaaagtcttgtgtttggaataggaagtgagtatttccctgtcattggaacttcaggatactcactgtggtcctctttgcttgtgagtaacatcatctctgatagcaactactaatgtattccttacatttcatggatcctgatccaagcaatgtgtcctagagaatacacaatccctgttccttgtgaaaccatccccacatctgaaaaaagacagtaacaatatgtttttaaaacctttagtttattacctaaaatattcttccataataatattctacattgttaaatatttggtacattatgaaaaaactattttcttagctgtaatattacttcataataaaaatctgcatggctaaagagacatttgatgcattaccaaaaaaaaaactagtttcttttttaaattttgttttaatttaaattagaaacaatcttgttttacatgtcaatcctaattccttttccctcccctcattccctgcctcccacaggccctctatctcatcctttctgctccttactgagggtgtagggtaaggccttccatgggagatcttcaaagtctgtcacatcttttggagaagggcctagccgccccctcaccaccatgtgtctaggctgagagagtatccctctatgtggaatgggatcccaaagtccattggtacactagggataaatactgatctactaccagaggccccatagactgcccaggcctcctaactgacatccaggttcagggggtctgggtcggtaaaaacctagtttcttacccataatattctttcataataatatgagtctacattctaaaacagctatttgatacatttgcaaccataataataaacacaagaagcgtatacggaagacaaaatctgtttgattcaaatcagctatgcaaatgagatgctaaagtcatttcaagatgcccctggatcccattcctattataattgtagcattagtgtttagaattttcatagatttcacctctgtaaatgtaaatcttgaactatttcttgagttgttttcttagtagtccccactaaggaactaaaatgatatccctcatgttacagaattctagaattatcttgaagctcacatataggcataatgactgggtattaacaaatgtggttttgcttccagtatagcatatcaggaagtttttcaatagtattacagaggaggccttcaaataacatggtaagtctcagagcagctctgaaaagcttttgttgtcagtgaaagtatgaaattttaaaagactaaataaaaacttcaaaaagaaaaagtcagtgaggactcagcatggcctctgagtgagtaggtatctacccagaagccatgggaggggggtgttatttaaagtatgagaaatataacatccatccaaagaaagtcggggtggttatgttatctcagacaatgaaagtaccgaaatagcatgattgctatacatgactattcaaacaagttaaatggtggtaaaggccgtatttcctaatacttaacaaacctaatctccaaacaataagaaatgagggccagggttatgtgcaagcaaaacgacctgagttcagatccccagaatccacatcaatgctgcccatgataaagtacatctgtaatttcaatgatttacaagatgggaatcagagacaatagaatccccagaagctcccaggctgtaattacaaacaacaacaacaacaacaaaaggctctggttcatagtagatgaggacagacacctgaaattttcctctaacccccatatttgcacaatgccaaatatacatgtcccccacaggtacaagggagattatttataatgacatagaatttagcctcaattttaaaagagtgcaatgtggcatataaacataattttagagatgtattttgtgttatttgtacaaaactctcacaaaaaaaaatctaggaagggagcttcctcaacttggcaagttgacatgcaaaaagaaatctattttcctacatagcagtgtgagactgaacacttacctctgaggttagattttattgtcagttgacacagcctggagttccatgggaagatgaaacctcagttgaagagttccatcaggttagcccatggccacgtgttggcccattttcttgactgttaattgatgtaagagcacccagcctactgtgggtgatgccatacctaggcaacttagactgggctgtataagaaagctagctaagccagccagagggagcaatccagtaagcagtgttcctccatggttcctgcttcaatgtttctactttgagttccagtcttggcttctctctgtgatggacagtgagatgatacaaactcttttttccccaaattgcttttggtggtggtgtttatcacagcaacagaaagcaaactaaaacagccagaaaccatgtatatgtgtatgacgccatgtattgtatagtgtaataagtcaaggaaaaaaagacataaagaccttcaagattagaaactcaggatatgtgcttcatctgcagacatatgaaacatgctaaaacattctacaacacacaacgaaatctcttaaaatctagaattaattagtaaactaaattatcagtgttgcagaatacaagttgcctataggaaaaaaaaacaattggatgtctgtgtaatttgttggtacacttacctgttaagggaatcacattgttcctagtactgaacactttcaaataaagctactacgaacacttccacaagtcttgtttcagacatatttcttgttcctcttataacagatatttatcatttttaaaagaaactaccaaactgtttcccatagtatttatgcctattgcatttctgaatcaccactcaacagactagaagcctgttcttgtttgttgtattcagataactttgtccagaaaaactctatgtgtaaaaaccacttctccaagggatcttaaaatacagttgcttattaaacctctttttctaataaaaaatgatggttccggaattgtcacttttcagcacgtatttcagctttaaggagtgaaatatgttaagttacaactaaccaaacaataatgttggatttttagggtgtaaaaataaactaatgaatgttttagtttggttgcatttccttttgtctagtgatatttttgttatactttgaaattttcatatatgcatacagtatattttaatcatatctcccccaaacatgacccctctctgactcctcccatgacacccctctcaacccatttccccccaacttcatgtcctctattattattatttattattattattattattattattattattattattactatctacccgaatccagttatccaattagtactaaccatgtgtagacagatgtgaagtcatccactgaggtgtgggcaatctgccagaagccacaaccctaaagaaaagtgctctcactccctcagcaatcacccactgccagtagttctctgctatgggtgaaaccttaggagcccttctccaaattttagagttatgactgctttttctagtgtagtttctatataggcaaccacggtactctaagttggtaaatgcaacattcatgtccagaagacatcatttctcttctctccttatcctctagctcttatattctttctgctcccttttccaatatgtcccctaagtgcccttggtagggagagcttgataaaggcaatccatctacagctgagcactcacagtcatttgtctcaacagctttaccagttatgagtctctgcattaaccattactcactacaaaaagcttctttgaacaagggtgaaatcagcattaatctatgggtataaacatgaacatttagaaggcagtttgacaaactaaccgtttaatgaaagaaacaaaaatcagtaggtaccccactatggcctatgatatcaccagccatacacttctgatgaggtttacaataccagacatggaatccatgctatggaacaggcctcaaaactaatcagaaagcagttggctactcctgtactagtcataccactattgctccagtgagcatagtgtgcctggcatattggtactacagaatgcagtgtccagggctgaataagaccattattatctgtgctgcataatgcatagtgcataacaccattcagcatatgaaagccagtctgtagagagacagtttcctgggatgtctgagacagaattcttcatagcctttattggttttctttctgtaagggagtgcagaataaataaatcaactaactgacatcattgaacaacatataacagtttacatgaagatgatttgctctttgagataggtttcagaacccaatggttcaaattgtcatacttgctatctaactttattaactggagagaaattattgtgaatatggagaaggaaataagtataaaatgttcctttttaataccaatattaaatgatatataacctccctggcatcgtatatggataacacacaattattcaacaacgttataaagcatgaattgcctgaagtgtgtagcctgacaatcatacctacatgtagcctggggaatgacttccaacagtagtaactccctacatcatcaagaaaatcccttcatattgagctagatagcacccctgtatgcccaagaaaattcgccgaattttactttcctgctgtccaagaccatagcagtctcctagaatattagatctctggtaatataaagatgtgtggtattgtgaatttgtcaataccatgggtatattttttatattctagttacagttagtatgtacttgattttcttctacagtctaaaaaatatctaatgtacagcccagttcttttcagtctctttattaattcagcaccgaataggcattcaatcagttatctgtagagaaataaatacatgcatatactatcaaaggctttatcacaaatagagaaataaatacatatgcatcatatttaaagttttattatcccccaaatagtttggtcctgataggagcctaaccaatatgcagttctgacaacctttttggtgatctcactattccagaaagattagagtctctatagtttttctacaagaatacacttgccagagatgaatgtggaataatttccaatgactggacaatgctttttaatctgttccagctgatctggactatgacgatgaacatcttaagcatctttgcaacattaataggtgtgttcctaatatcatttgaactgatcctgacttcaaagttaaaaactcctctgtggcaatatgtaagtactgggtttctgagggaatttcttcctgattttagaattaatgccttcagtgaggatcaaaatattcaagtattagtcagatcaccaagagtcctcttctcggtttactctcaggcatacctgcctgctaattagcgtgatacaagctacatgttacagttcaaagccatcccaagaaaacccacaaaacacctaaccaggctcatagaaactaacagagtctgaaccaacaactagggggcctgcatgtgactaacctaggccctctacatatatgtgacagttgtctatttgtggtactccctaaccatgggagcagagtctgtacctaatgatttggctggctcttgggaacacattcctcatactggattgccctgcccagactaaatacaaggggatatgcttagccttacagcttgatatgccatgggaggcctgccactttcagaaacagaggaggagtggtctggggagtgaggggagttgggggagggaatagaagaataagagggaggtaaaacatggtcaagttgcaacattaattaaattaaaaaataagacagtggtgtagtctacagagtgaagcttatttctacaatagatgtttggaaggctcatatactagggtccatgtgcacaatgccatgtgaacatttttgtgattttgcatctgtctgttagagggtctatgcagaattatttaaggctgtttgtgtttgtgtatctgtggtcccatgtaggtgggacgatgaacataggcacacttagtcacttaggtttgttggtgtgaagagaaaagaggatgaggacagagaaggaagaaattctgagcaaattatgtaaaaatttgaagtcatggtattgaattcctgtctatggactactgtctatgtccaggtttgtctaaggacatagacagggctttatagcagccaaaacagatgggccttaaaccaatacctagaaaccacattttaaaaattgatgttattagatgttgcttgtatctaactttctaacctaattaagaaagctctccttacttcaacatacaagagttatggtaaatagactagttccgaagtatataagggtttgtaatacattgttacttttttcttatttctgtgtgtcatcgaacaaaactttaaaataaataaatacaaatatagaaagaagcctatgtatctctgactcaatagagaagcaagctttgaaatgttcagctattcgctcaaagtcatgggtctagtcacctaaagagcatttatgctgaacagggctaaattccaagtcacctcaccacagtaaatagagtcttaacagaaatcaattcagtagcatatgagaagaccgttttattgataagggaaatgcagttctccgttactatcatttactgaataataaataagtcctattacaccaaacctcaaaagaaaatgtaccacaattttatcttctccagaggctcattatccttaagaaaatatgctggttctacccacaacaacaaagaaaaaatacaatgattaccattatgcttttttgcagaaatgtatcaactcaccatcctcaataactcttagttatcatgtgatcaaatttatccataaattttcagctgttgagggtataggatacagtaaacaatttatcttttcatttttctgctgcctacaatgtagctatataatttttagcattaaaaagtaaggagttcataaaatgttctaatcaggcactagggaaatgtccagagatctacaaggatgacaccaactaaccatctaagcaacaatggagtggctaacttaaatgccctcccctgataatgagattgaagactaacttatatgcatcctccgggtggatttccttccatttgttctagagcttttagtagtgatgtcaatttcctggtgtgactattctttagtttcttcatgtgagcacttagagctatgaaatttccacttattactgttttcaaagtgtcccataagtttgggtatgttgtgtcttcattttcattgaattctaggaagtctttaatttctttcttatttcttccttggcccaggaattgtgcaattgcgtgttgtccaatttccatgagttggtaggttttctgcaatttgtgttgttgatgaattctaactttaaaacatggtggtctgctaagacacggggcttattccaattttttgtacctgttgatgtttgctatgttgccaagtatgtggtcgatttcagagaaggttccttgtggtgatgaaaagaaggtatattcttttgtgtttggatggactgttctatagatgtctgttaatcccaattgggttattacttctgttagttcctttgtctctttgttaagtttctgtctggtggtcctgtccagtgttgagagtggggtgttgaagactcccattataactgtgtgaggtcttatgtgtgatttgagttttaataatgtttcttttaccaacatgggtgcctttgtatttggggcatagatgttcagaattgagacttttcctgatgggtttttcctgtgattaatataaaatgactttcttcatctcttttggttgattttagtttgaagtctaatttgttagatactagaatagctaccccagcttgtttcttgggtccatttgattggacgatcttctcccaaccctttactctgaggtaatgtctgtctttgaagttgaggtgtgcttcttgtatgtagcagaaggatgaattctgcctttgtatccattctgttagcctgtgtgtgtgtgtgtgtgtgtgtgtgtgtgtgtgtgtgttggtttttttttttttgcagatttttttaaaattggaattagaaacaagattattttacatgacaatcccagttcccttctccctcccatcttccctaccaccccccccaactaaaaccctacctatcacatatcctttctgcttcccctggatggtgaggccttccatagggtgtcatcagagtctatcgtatcctttgggatagggcctaggcccaccctcgtgtgtcttggctcaaggagtattcctcaatgtggaatggggtcccaaagtccacacctatgctagggataagttctgaactactataggaggtcccgtagatttccgaggtttcctcactgaaacccatgttcctggcatctgtatcagtcccatgctggtgtctcagctatcagtctgcagagcaagagttccccgatgttcaggtcagttgtttctgtgggtttcaccagcctgttctggaaccctgtggtcttcactcgtccttctctgcatctggattccagttcagatcggtgattagttgtgtgtgtctgcttccaccacctgctggatgagggctatcgagtggcatgtaagtcagtcatcaatctcattatcaggaggggtatttaaggcagcctctcctctgttggttagattgttagctggtgtcatctttgtagatctccagacatttccctagtgcccgatttctctgtaaacctaaaatgtctccctctattatggtatctccattctcgttatcttctattcttcccctgactcaacctttctgctccctcatgtcctctgcatcttcttctccccttctcattctcctagctccctcctcccacttcccaagctctcaatttgctcaggggatcttgtccctttccccttctccaggggaccatgtatgtctcacttagggtcctccttgtttactagcttctctggcagtgttggattgtaggctggtaatcctttactctatgtctaaaatccacatatgagtgagtacataccatgtttgtctttttgtgattgggttacctcactcagaatggtttcttctagttccatccattttcctgaaaatttcaagactccattgttttttttccactgagtagtactccattgtgtaaatgtaccacattttctctatccattcttcagttgaggggcatctgggctgcttccagtttctggctattacaaatagtgctgctatgaacatccttgaacaaatgtccttattgtatgaatgtgcttcttttgtgtataggccctaagagtggaattgctggatcttgtggtagactcattcccattttcttgaggagttgccataatgatttccaaagtggctgtacaagttggcattcccaccagcagtggaaaagtgttcccctttctccacatcctctccagcataaactgtcattggtgtttttttattttggccattctgacaggagtaagatggtatctcagagttgttttggtttgcattttcctgatggctaaggatgttgaggaatataggtttttgaagtatgacctgatgattctttggatttcctctgtgtctgatgttatgtgccctgtttcattcatgattttattgatttgcatgttcactctctgctgtttggtaagactggataaaggtttgtctaacttgttgattttctcgaagaaccaattctttgtttcattgattctttatattgttctcctattttccattttattgatttcagtcctcaatttgattatttcctggtgtctgctcctccggggtgtattggcttctttgtgttctaaagctttcagttgtgctgctatttctctagtgtgattattttgtttcttcatgtgggcacttagcgctatgaactttccttttagcactgaattcaaagtgttccataggtttgggtatgttgtgtcggcattctcattgaattctaggaaatctttaatttctttctcgacccaggaattgtgcaattgggtgttacttaatttccatgagtttgtaggttttctacagttcgtgttgttgttgaattcgaactttaaagcatggtggtctgataagatacagggggttatttcaattttttttttgtacctgttgaggtttgctatgttgccaagtatgtggcgctgagaagaatgtgaattgttttgtatttggatgaaatgttctatagatatctgttaagtccaattgtgcataacttctattagttcctttgtttctttgttaagattctgtctggtgttcctgtccagtggtgagagtggggtgttgaagtctcccactataagtgtgtgcgattttatgtgtgatttgagtcttagcaatgtttcttttacaaatgtggatacctttgtatttggggcataaatgttcagaactgaaacttcctcttgatggatttctcctgtgatgagtaggaagtgacctccttcatctcttttgattgattttagtttaaagtccaatttgttggatattaggattgctaaccccacttttttattggttccatttgatggaaaaaaatcttttcccaacttttaattcttaggtactgtctgtctttgaaattgaggtttcttgtatgcagaagaaggatggatgctgtcttcttatccattatgctatcctgtgtctttttataggcgagttaagaccattaatgctgagggatattaatgaccattgattgttcattcttgtttgtttttgatttggtgatgttggggaaattatgtgtgggattctatccctttttccttttgggtgttggtaaagtggtattatctattgcctatatttttctgattgtagttaacttccttgggttgtagttttccttccagaactttctgtagggctggatttgtgaatatgtattgtttgaatctagttttgtcatggaatatcttgttttttccatctgtattgattgaaagctttgctgagtatagtagttcatggtctcttagagtaggtagaatatctatccaggaccttctggctttcagagtttccatggaaaagtcaggtgtgacctttgctgctcttaatattttctctttgttctgtatgtttggtgttctgattattatgtgacgaggagacctttttttggttcagtctatttggtgttctgtaggcttcttgaattttcattggtatgtctttctttaggttgggaaagttttcttctatgattttgttgaatatgttttcggcacccttgagttggatttcttcaccttcttcaataactagtattcttaggtttggccttttcacagtatcccatatttcctcgatattttgtgttagggattttttggacttaagattttctttggtcgatgaatctatttctcctaatgtatcttcaacgcctgagattctctcttccatctcttatattctgttggttatgcttgtgtctgtagttcctgatcatttacccagcttttctgtttccagcattccctcagattgtcctttctttatagtctctatttcaatttttaggtcttgaactgtttcctcgagagatttgttgatatcttgtatttttttggtttgttttttcttccatttccaaagggattttctcatgtcctctttgaggtcctctgtcattttcatgaagatgtttttaaggtcattctcttctgcttcatctgcattgtgatgttcaggtcttgctggtgtatggttcctagtctccggtggtgtcatattgggttttctgttgttgaatgtgcttttacattgtcctcttctcatcctttcttctgctgggtgtagcaggagtctcttcctctcctggtgggtaggggactaaggttcccttctggtagatgcaaacagatccaatactctgatgtctgtcctcttctcatggatggaggtggcactgttaccggggccttggaagtgtccaggtgtgccaaatcccgctttggagctcagatctggtgaacagacccctggtgtcagatgtctctgagcagggccaccgaactggaaccagaaatcacctctggcttacctgggccagtgcatggaggcagaactgttactggggcctcagcaatgtccgggtgttttggatcccactgcagagttcagatcctctctctcattctgtgtgtgtgtgtgtgtgtgtgtgtgtgtgtgtgtgtgtgtgtgtgtgtgtgtgtgtgtgtgtgtgtgtataggcgagttaagaccattaaggaccattgaatgcttattcttgtttgtttttgatttgttgttggagatggtattgtgcgtggatttacccttctttttcttttgactattggtaaagtgggattatctattgcccatgtttttgtgagtgtaaacttccttaggttggagttttcctttcagtactttctgtaggactggattagtggctatgtattgtttaaatctggttttgtggtggaatatcttattttctccatctatagtgattgaaagctttgctggatatagtagtctgggctgtcatccgtgatctcttagtgtttgtaaaatatctatccaggtccctctagctttcagagtttccatggagaagtctggtgtaattctgataggtttgcctttatatgttacttggcttttttcctttgctactccttgtacttttttctttattatgtacggttggtgttttaattattatgtggcgaggggactttcttttgtggtccgctctatttggcgttctgtaggcttcttgtattttcattggtatgtctttctttaggttgggaaagttttcttctatgattttgttgaatatgttttcagcgcctttgagttggatttcttcaccttcttctatacctattattcttaggtttggctttttcacagtatcccatatttcctcgatattttgtgttagggactttttggacttaagattttctttggttgatgaatctatttctcctaatgtatattcaacacctgagattctctcttccatctcttgtattctgttggttatgcttgcatctgtagttcctgattgtttacccatttttttctaattccagaattccctcagtctgtggggtcttttggttttgtttgtttgttttttgttttgtttttgtttgtttgtttgtttattttttgactctatctcagctttcaaaccttgcactgtttgaattgtttctagcaatttttggtttgtcctttcttccatttctctgaaggattttctcatttcctcttagggtccccatcatctgcatggagttgtttttaagttgctgtcttctgcttcatctgtgttgggatgttcaggtcttgcttgtgtccctagcctctggtggtatcatattggtttttctcttgttggatgtgttcttatattgtcatcttcccatctcttcttccagtgggtgcaggtgtcttcctctcctggtatgtacaggtccaaggttctcttctggtgggtgcaagagggtctgatactctggtaggtctcaaggtgggtgcaggctggtctgaggcactgacactccagatgggtgggagtgggactagcacagagatgtcagccatcttggggttgcttggtcctcaggggccgagtcgacctgcctgcagaccccaggccaggagttcccagagtgggcaggtggaagttgggcccaaggtagaggccaaagcagctcacctctgccctgagtcgggagtgggagtagcccagcgatctcagcagagtcagagttgcttcgaaatataggttcttaaggcatgtttttatggttttgaattttgctgcaaagtgttttaatgtgtcttttaatttctgttttattaagcattctccatctttcttttgcttaatttgactaagggtttgtcaatctattttaaagaaccaactctctgctttagtgattctttgtattagttttttacttgtttgtttatttattatttccttaatttcagtcctgatatggggtattcctagctactgtttgggaatttgtattcttcttgtttttccaaggctttaaagtgaattaccgaattgttaacttgaggtaatattttttaatgtaggcaccacgtgctgtatgtaagctttccttttaggattgtcatcatcgtgttccattgacttttatctattatgtttttactttcattcaattctaggaatggtttttacttccttcttgatttcttcagtgacacaattatttaaaaatacatagtttaatctccatgagttgatatacttctttctgttgatacctagctttatccctttatggtcaaatagaacacaggattttatctcaactttcttatatttgttgaaatttattttgtttcataatatgttatatatttttagaaagttctatgggctgttaataaaaaaatgtatattgtttagtgtttggatgaaatgttctgtagacattaggtctgtttgacatctcaccatcactgagtagcaagaaacattgcctaagaattagaatgtaaaagttgggctggagagatggctcagctgttaaaggctaggctcacaaccaaaaatagaatgtgagagttaaaagatggggaggaattctgtcaagtgtcatgttctgaacatgatatggttatcataaagaactcagagcatctgtgattacctgcacagtatctatacaagaccaagccaactaaaattctggcatagacagagtagatgaacaccaggccccaaccttttttaaggagctattgaattgccaaagggaagaagaatcatacttctgtaaggatatggccacaagtccagtggatggctccacacatatacatacatgggctatcaaaaaaaagccacgaaatggggaggggaatcacaggttggcacaagaggagttggaggaagaaatgggagtagataatatatctttctctctctctctctctctctctctctctctctctgtgtgtgtgtgtgtgtgtgtgtgtgtgtgtgtgtgtgtgtgtgtgtgaaattctcaaaagtaaaaagattaagtaaaactgtatgttttcttttgggatacagcgaagtgctaggatgcttacacaatatctcttcctgttcactatgctggagttgttaatggcagccatagtaactgagtggacctacaaagcaagacaaacagaagaataaaatagtgagtctatcatttctcctttagtgaacagaagctactaacttctgtgaggtatcctgtccaaataacttagaaagaattaagcatcaatagtgtcatctctaaactgtgggtagagtaggtgaatacgttttgcaggactaaacagctctttctataattgaagctaaataaattaccctatctgaagtaagcgtagctgaggagatagctcagcagtagaggactcggtaggatttgtgagagtctctgtttgatacctagaagcagcactaaaaagaagtcgggtgggtaacttgggttagaggacagtgatagaaacactggtgccgggttttatattcagcactacttgattgaccgtagttcccaccatccacccccacaaacactgtgtcccagcttcatcacttgattcttactccgtgaatacaccttgttcagtgcactatcttaatttgtagatggaattccttaaggaatctctgtctgaaattaatgtgataaaattaaaaagggagaagacattatcagatgcatttcttcttagattttcccctttatcttgcctcagaagctacctctgagagtacttatatctcaatcactgtttgcctttcaataaattttcctcggataacttggtgaaatatggggttgaaattcacctaaatgcatagcactcataaactttaaaaacatatggctgagactgaagtaatggctcagtggttaagagcatttaatgctcttgcagatgatccaggttttattcccagaacccacatgttggcttacaaccatccataattccagttccagggaatccaacaactctcctctgactgctgtggataccagaaacatgcatcgtgcacaggtatgcatgaaagcaaaacacccatacacatatataaatctttttttaaagatatatgtgactttacttaaaagtgaaacacactcaaattctctgaacaaagggacaagagaaagaacataagttgaaatggttttctactcgtactaataaattttaaatagagaggagcagaatatataggagaggaaaaagtaggaagggaaataaatagcaggaggaaaggagagaaaaatgatttaaaaaataataaggactttaaaaaaacagcatggttttgtctgagaagtatctcaggtgaagctctcgctagcatgtataaggctatgggtttcaggaccaatacaaaagagaaaaaagtacagctcatgaccttgtttatttaagactctcagcgatatgactatttaccccttagatttccttttaaagtgctactgaaattgtatagttcttaaatcgaattaattagtaatttcctaccatccacattacctcaggttcctagaagaaaacaacccttttcctacatgttaaaagcagtatcatggcctgagtcaagaagaaaagtgcaatgatgaatggaggacttcatttaattcaagggactgctcagaactggaactttattgtctgcctcggcatttcctctcctccatttcattaattaaaaagaaatgatgacaatggatatgtttgtctttatgtgggaaattcagcatgaatttattgttataagttaatctgggtttgaatctggtcagcctgagttagctgctaatcccaagaaatctcgtgaataggcatggatttcctaacatggaatctacaccttatgatgaggtgaagtaacgctgactcaaagcaatgaaaagatagataagccacctcatcatcagtgaagcagactagctctaaacatatgtctaactagctattgttaaatgatgcataatttatctaaaatgtggagtttatagtaagtactattatatgtatctttatgtaactgagaccacataaatgaatgtccacagaattcttttactaggaagtccattttctgcaatatttcattctttttccgacagcttttctcttttgattcatcatacttaaattttatgtgttttaggtaaactatcttcccagcaatattcttctgtgtctgtgaatatctttttcactggtcatctttctattttctgtgacaaaatgcctgaggaaaacaagttctaaaaaagaaaagcttgtttaggctcccactttccaggactgcatccacatttggctggatctatttctttgggggttgtggtaaaacagcaccataatgaggagagtgtggcagaacaaagctggttacttcatagaaacaaaggagagaggaaagggagggagaaaagaagagtacaggggagaggagggagggagggaaggagggagaggagaggaaaggagagaaaagaggggagaagggaagaaagggagggaaggggagagagatggggagagggagagagagagggaggggaggaagaaaggaagaggaagagagagcagcaacaaccatagtgtcaccacctcacaatcaccacaggttggaatcaagtcattagcatgtggaccactggagaacacttgaaacctaaaccaaaaccccttccctccttcctactttttgaaccccacatcctgctgccacctccctgtcttcataaacaactgatccatggtgcaaaagatacatgttttatatgtgagtggccccagagaaggtctgtggcattttattatagtcatagctataattcacatagactatacacacatgtacatgtacctttctgatagggaaagtacttctgcgtatatgtttgtcttactggttgataaataaagcactgttggccaataggaaagcaagataggtgggactaggagttgaggaggattctgggaaatgtagtatagacagaagtcaccatgtgattccctaggaagacaggatgcataaggccggcgtcctcgataaggtaagtctttataaaatatatagattaatggttatggttgataattaagactaagctaacattggaccaaaccaagccctctgaatgtgggtgccagctaggaggccaagacagtctatgggacctctaatggtgaagccagtctttatccctagagcacaatagactttgggagcccattctctatggagggatactactgtagcccagatacagcaaggagggtctaggccctcctctgaatgatttgacagactttgaaggtccctggtgggaggcctctctatccctggggaagggtgggaggttagaggggctgggggaacatggcaggattagagggcaagggaatgggggatggatatgtaaatatgagttgtaattaaagaataaaaaaagactgagctaacatataagaaatcttagtcattggctagcagcattgtacttataagtctctgtgtgttattttggggccctaacattgtggcggaactcaggcagctggcataaagagttatcattacacttttctactcctattagtatatttttaaaatccactcatgttgctatttgtatatcagttgactttaaatgctgcctgataatttgtggcatcaatgtcagcatatttatacattccttcctccaggaatggacatgtaggttacactttcttcccttgaataatttctctgggacatgcactcactattcaacagagtgtctaacatatatgcatacacacacacacacacacacacacacacacacacacacacacacacacacaccatttgcttaaggagagcaagaagtgccaccatttcgagcatgcctctgttgcaggttacttgatgttgcataccttttctacaatgtactctgtatcctcctggtctcttaaagtttcccagatgctgatacccataaccattggttctggccttccagtgtggcaactccctttttctttttgccattgcttagaactggagttcacatgagcagtcagtagtcatctactctattcctggtgaactggaaaccacaattctgagagagagtggaatacacagatgttgcaagaaatacagaatgaggaacaagatttgaatacttcgacaataaaggactattagacaaaataaagttcataagccatggcaggaaatgaactaaattacgtaggaatgcagacactggcaaatagaactcgtaattcttagtgaacaagaggtatgaatacgtattctggagagagatgatggaagaatgtgaaggctttgatttgcctttcaaacaaatagaaagtcatctaaaaattggggaggggtgagaagatacctcaatagataaagtgcttgccatacaagcatgaggatctttgtttgaatccccagaatacacatcaagccagacatggcagctcacacgtctgtcgtgccccctctcatatgaggagcctgggtgagagacaagagcattcccagaacctacctgctaattgttcagttgtttccatttgaggctgtgttgtggtttgggtgtgaaatgtcccccataggctcttatggccacatttcttgttctctatttgcctcctgactttcagcccgactttaggcttctgctactctaccttccctaccatgatggattctatccttttggaattgtaagccaaaataaacacttccttcccctaagttactttttgtctgggcactttctcaaagcaaacaaaaagaaactaaaacatgctgttatgaatagtgtgactacaaatatttatggacaagtttttatgcggttatgttttaaaatgtatgtggatatataccaagtggaataatctctaatgatacaggaaaaacacagacagcccttagaagcacatctaacatttcaagtctacttattctaaagtctctgcacagtttaccagcaaactctcagtgtattcaccaacacttgtttttgtctgtctttccctgctgtattcaccctagtgaatgcgaaatagtatcttgatgtggtatattagtgtgacttcaacttgcatttaatcagttcaatatcttttcatgggtttattgactactgtaaatcatctctgaacatacagactcttttgtcagtgcttaatacagttacattattagcctcattacaggttgtaaagggtctttatatatcctcagctgagatcccttctgagatgcagtggagactctgtaagggtttagccccaatccttgtgaatatttgcttccattacatgagtcatcctttttcacatttttattcatttgtaatgtataaaataatgggttttaccataacatttcatacatgcatttcatgatttgtccatgctcttaccaaattacccccttgatatgtcattgaagtcactttgcatgattttattttttaaaaatgccactatgctcatctaagaaattgctctatagtttggaggcctctaatatgttgtgatctatttgatttgtagcaggaaggaaccttgcagcaatagtcctgcttcagcctcctaaattctgggattacaggtgtgagctatcacctttgttatcaaaagaataaccttctagactagtttggtaattctttctgaagctgtgggtgggtggactgtctccaactgagctcttgtctgcccttcaagaatggattgggcagacagtagggagaaagaaaggtgactatttgcaagaagggaatagcaattttgaaagaaaaaaattccaagacccttggtggtaagagacactaaccaagaggcaatgttccagctctaactccacaatatgcttggggagagaaattgcttgtgttacatgttcgcactctccaaaggccttaaggtgccagcctagagcaatctcttacagaccaagcaagtttgcagtatgccaaagagagttctgtgggaacttcctgctctgggcagaagcctcaggcatgagaaacaactgagtccatttcatgtttccatcttcctcaaatcttgagcatccaggaacagtccacatccagagtcggcatctgggctctgaagtctggtgtcttcttcatcaagttccatgactaaagtgtgtcttgaaactatgagcatgccagaatgtattaagaaaccagctgggcctaattggttgagcgtggatactcagcaagttaagatttaggacctgccagggaagagttaccaaactctaacttgtgggtattcccagtggttacagtcagcttctgcctgctctttccagcttgttcatacttgggactctggctgtcaagcagagctttcatgtggcagggatttgtgtcttttgcagatactgcttctacactgacagcttgacagctatcaactgtccactcttggtcctcagtcttgagttgcctgtcagagagccctgcagcttaaaggaagctcacaccgggcccttcctacccctaccacttcttggttgttgttgttttcctttattttattattagttatttgagagtttttatacaatatgtattaataatattcaccctcttttccacctctcccccaacttacccctttcctacccactcaattttgtgttgtctttatttttaatccttcaagaccagtttataatgcccaaatatgcattcttggatgtgtggtcttccactggagagtgatcaacctactaagggttacactcttagagaaaactttctttctctctgccagcagctaacaattgccagtagctccatggctaggggtaggattgtaaatctctccccaccatgctataatttggtctctttggggcttgcacaagttttgtacatgccatgacaaatgctgtgagttcatgtgtgtggctgccctgccatgcccaaaagataatgttttccttgtagtcatccatccatctcccctggtttttacattctgtctgtctcctcattctcagtgatcccttcttttacctgttagaacctatgtcaagtatcactggaaatgatgtactccctggtccaggggaaacttaatggaggatgaggagaggtgatgaaacaaagtttcaaattataattttgagattaggtgggatggttaaatgagattcatcatacatgtttctgtgtgttcacaaactctcaatataaatccaaaatgctaacaaggcttcaaacttgcctcatcatctcctggttccctatccttactccacacatgggcctcttcctggaataccttgggagactggcctcttgtgagacctgatacctgccctctgcttgccccaggtttccccaagcttctttctgttgatttctttatgcctttgatcacaaatccttctttcagtgaggctcttgtgtacacctcccattaccacgcaccctgtgtatctctctactgagatttctttattttctccttagtgttcactaatttgatacaacattttcttgtgggtcttgtttattattgatttcactataataaagtccccaaaagatgtattccacttgctttcttcactgttgtttgagaccagaatctggcacatacaagtcctcaatgaaaatgcattgaattgttaggctataagagagagtctactgttgttattttgctaaatactcatgttgtcaaactgcattctaaatatttgtatttatacccatagatctgtactgctctcaaccttgattggagaagcttctttttgcagtaagtaaaagttaatgcagagacccatagctaatttaagtgctgagaataaggggctgtgagtgtccatctgtatatggctgatccatatcaacctcccccatctaaaactcagaaaacatagcagaagagaggacagaaagaatgtaaaagccagagagtagaggtaaaaactttaaaatactatcttatggacatgatatggctgttacacaaactcacaacagctatggttacctgcataaggcctgtataagatgaagcctattaaaatcccaacatgagtttggaggccttcctggggccttgcccctaggtgaggagctataggcagttggtggtggctggagctgaggacagtcatttttctttgggaatgtgaccctggtaggttgttcttgccctagtgaatagtcctacacttatgagcttagacagcacttattgggctcagtgttatacaggggagggataatgaagtttggaggaagatatgttgaagaccctcaaatgagttggagaggggagggagaacctatataataaagatacactgtacatgttaggaaattttcaaataatgaatttaaagtactattcaaaaatgtatcaatttccaatatgccaaaaacattattgccaactgccatccatttaagtcattgtctattagaaataagaatcacttgttcctatcatatatggctgagcactaaataggaagctccctgtgagggccataggtagggtgggaatgtgtttgtaaaataattttgatcttcaaacagctgtagcacaaatttgtgaagtatccattctgccaaagaagagactaagggacagaaaagttaaatggagaacactctcaaggttgggttcaccatatccagattcttggtgcctgggagttttctgaaataaatacaattccatgatttccctactccttctatgtccttctcactcccccacatcagaaccctcctatataaatgaataaacttacaaatacagcctgctgaattccttcagtgttgcctacacgtatgtttctagagctaaccacttagcattgggtgaccaatcagggggctcattccccgggaaggccaatctcatcattgcttgcagatcttctgtcccgatgctcttttttcctttttttcacttatcatacactatattttgatcacatcctttcccctccctgaagtcttcccccacctccctacccacccaacctctcatattgtttttcactctcaaaagaagaaaaaatgaaaaagaaaaaagactaaaaccaccaagccgtaacaacacgtacacaggaaaacatggagtccattctgtgttaatcaactaaagcatgcacaaattcaaaccagacaaaaatcccagaggggaagtgggtgcaaagttccacccctaacaaaaaacaaaaaacaaaacaaaaacaaacaaacaaaaaagctatttacagttggtacttgctgcaaggggaaatcaattttctccaatgtaatgataaggtgtgtgcttcttcgaagagggggttctcagaccagcactgggtcaccacccctcagccatagaggctaacacagaagccccaccccactccaacggggctgtgctgtgcatgggaacaaggacactgtcaggaaagctgtgcgtttggccgctgctccctttatctgcagacgaactgtgagatcagtggggctgctgcctgccactgccactctccccggtgcccacgtgggactctcgcgcagtgcccttggtaaccacgctcttgaccacaaccgcagctttagaccctcgcgagtgggggatgaaggggtaccacccaggtagcagcgcccatcgggctccgctccgtgggctgcgaggctacgagccccccaacagagggcgctgcccaccagaccacaccactggccctgggctcagcgcatgatgtgagtgtggtagccttggctcagctgccattaagactcaaacagctcacactgaaggcacgggttgcgaggccctagcccctggactctcatctgacttattccatcgctaggaatgtttttctggtaatatctgagacatccaagctcatcatctatgtatttgggcgagattcagacgtctaggtggcttgtccagcttcacctgggagaatcttctcagtaagtgagcaccaatgggaaggttacccatattcgatgcacactatcacaaaccaagacgtccaggttatgtgatccaccagacttgagttctaggtcgaaactgttgtttatcctcacccctgacccattcaacaaccctagaacgtccttatgaacctaggagtctgcatcaccagggtccctaaagtgatctccccaccccacccccagatacatatattcatatagcctggattttaaacattaccattccatacatactatccaaattggatgaaagttactaagttccaacttgttcttaggaacaatagcaaacaccacagtggctccatctactccaccctccctctatgaacaaaacacttctttaattcctgtctttgttaatgttaagccaatgaatggctggaggccatgtgctaagacctgccccctcagataccctgaaccaaaagccagtcctgctgggttgttacgaacatcaggagcccaaagaaacttaggtatcatgcaccatagagctccagggatgtgtcgcatgcaatgtgcttaaattctgcagtgtcgaggatgaatatgacacaaacacataaaaaatatgacatattggtggaccagaaactgatcggaagtggctagagtttgatttatcagttatgtaagtttttgtttctatgtgaccttcttagaagtacttttcctgaacatggaaataattatttccagtgtcattttaccttacaatatctttttttacttcttgttatttattaacttggcatatttacatgaatttataagaatttaaattttcctcatttttactgaggatgtcaaggtccatcacataatggctagtgacaaggatgtcagtataatttcaaccttaatttgcactgtattttaattgtcacctaccacactcattttgaaatttctcaattaatttaaaacccacagaaaccactagcctaacttgtgggaatacacagagtctgaaccaacaaccagggagcctgcatgggaccaacctaggccctctgcatatatgtgacagttgtgtaacttggtctattttatgggactcctggcaatgggagcagggctgtcccctgtgctttggctggctcttgggaacctattccttatgctggattgccttgctcagcctgaatacacggggaggtgcttagttttatggcagcttgatatgctatgctttgctgaagctcaagggaggcctgcccctttctgagcgactacagaggaggggcgggttgaggtggaagggagcgggaggagaggagggatggggctctggtcaggatgtaaaataaataaatttttagaaaagaattgggatcacaaaacaacccaaaaagtcatgaatgtgagaagggggctataaggaagagaggcatggcagaggtgggacagaggggaaagttaaaagaatacagtttatacatgtatgaaatcgtcagtgacaaatttaatcaataaaaaaggaaaaaataaaaatgtccccatatacccataagctcagtgctgtaagggacagagacgccctgcaggagcttgttggccatcagtctacctccaagtaagtaagagaccctctctcagaggacgtcaaaatagagtgatagtgcaggacagctggcaccctggtctgacctctgcacacccgcatgggatccaccacatacacgcaaaccacccacatgccggtaattgcacaaaaatggggtccctgtgtccattcagagtcatgaaggcttttagtttcccccgaacatcataacctcatagacatcatagcctcataaaccgttggtataatatatagaatcatcatctagattttgcatcaattaagtaattgcgggccaagtatgagcaattctattcttttttaaataattatgtaataataatttatctatttatttaggtttttcgagacagggtttctctgtgtattgctgcctgtcctggaactcactctgtagaccaggctggcctcaaattcacagagatctgcctgcctctgcctcccgagtgctgggattaaagagaaattctgttctatgggacattttggtaatttatcaccctgtattagacctatccttaaatcagtaatttatttacacctgacattccatactaccccaatcttcacccttctaaccaaaacatattaaacctatcatgagagccagctctttgatgcctcttattcttgaaataacttctaggggaccatatattgttcttacaacttctatcctttcacgtttaaacacataaatacttatatctttgcatatttatttgtgtttcaaaaatggatgaacacttacaggaacaaaatatgcatagacatattttacttcctcaccaaacaggttaaagcaatgaaaaacgagcttcatgctaacatgtccacatcttgtagatatggcagtcacttcaagtgaagcttggaagtttctcttttgtggctcataatgtacttatgaccattcacaaacatgcttggtggtttgagtgagaatgctctccattggttcatagtttaatattttgaatacttggtcccagttgttggtattgtttgtgaaggattaggagatctggccttgttggaaatgtgacactaggggtgggctttggggtttcaaaagactcctgccatccacagttgtctctctttattgtgcttgtgtcacagatctgagctctaagcttctgatctagcatcatgttggcctgcctgatgctatgccctccatgatggtgatggaatctaaacctcagaaactgtaagccataaataaactcttttataaaggtaccaagatcacagtgtctctttgcagtagcaaagataacaagtcactttcaacaatcatgatttttcttttatttttgttgttactattgtcaaaataatttagtcaccgggagtctaattgacctgacttctggcttctttatctttttcaaataatctttgatattttggcagcagcctttcctttctactagtttggtttcttgttgctgtgataaaacactgatgaaaatcaagatggttacatgattacaaaggagtttatttcatctaacaggttccagttcatctttgaagaagtcagggcaggaacttgatacagaagccatagagctcccctggcttgtttcactacctccattatataatgcatgattacctacccagggataacaccacagtaggctaagccctcctacatcagttagaaattaagaaaattcccccacagacatgcccacaggccaatctaatgaaggcaaaccctcaactgagcttctttctccccgtatgtgtaggtttgtgtcaagcaggcaaaatacacaataccttctttgaagatggtgccctcactcataaagtctcatgaacatgactgactaaacaggaactgaacaagagcaatagcagtagacattccaaaatggatagagaaaagcccacaagccctcaaccctacatgaagtgctcaggcaactgaagaatcctgagagtgagagaaatagtcttccccagggaataccacagcaattggttatctaataccaactggtcagccctgaaagtatgcatgcaagtagcacaaagactgagcaggtcatacttaggaatatatatatatatatatatatatatatattttatggaatatattatatattagtaataataacatatacatatatgcatggaacaattcttaatgaaaaatgagtccatcaatttgaaagatgatgttgtctaagttaaggtttcaattgttgtgaagagacaccatgatcatgacaactcttataaaagaaaacatttaattgggtggcttacagtttcagaggtttagtccattatcaagtgaggatatggcagcgtgcaggcagacatggtgctgaaggggtagctgaggttctatatcttgcacagacaacacagagtctgcagtactgggaatgacttgagcatatatgagacctcaaagcccacctccacaatgacacacttcttcctacaaggctatacttattccaacaaagccagtaccattccctatgagtttattgggggccaattacattcatactaccatattccactctctagccctcaaaagtttataacaataccataatgaaaatgcatttagtccaacttcaaaagcccttattgtctaccacagtctcaacaatgtttaaaagtccaaaactcaaagtctctcctgagattcatgcagtctcttaactgtagtctcctataaaatcaaaatcaaagaacagatcacatacttccaaaatagaatggcacaggatatacgttaccattccaaaatgtagggaagggagcatagtgaggaaatagtagaccaaagcaaaaccaaatatcagttgggcaaaccccaagctctgcatcttcatacctgatgtcaaaatgctcttcagagctccagctcatttcagctttgttgactggaacatacttctttctcttgggcttgttccacttcccgttagcaactttcgttggcaggtatcccatgactctggcatctctaatatctgggggtctccaaggcaaaccaggcatcgacttcacagtttcacacaatgcctctctaagcctccattcaaggacacccctagcacacacctgacctcagcagctttccttagtcatggaaacaaattccatagcatagtctttttatccttaactccagaaacatgtggccaaagctaccaagttctgttgcttagtgtggctgatggcccctcatttaattacagcttcttcaactttctgccttccatggtttgcttccctgactaagcacatgcacctattcttaatccagaagcaatctccatttacaaatgcgaatttgttttctccaaggaagtctccgtgaggaaacaaaccactcttgttttgctttgtttttcaagacaggctgttctccatgtaacagccctggatgtcctggaacttgctctgtagtctacatgtaggtgcatgtgcccacatctactctcagctctaggaccccacctgctgcagacccatagaatccctatacatgctgccacagtctctatgagttcatatttgtgtcagccctgttatatctaaaaggcctggattcctccttcccctttggctcttacacactttcagcctcctcttctgcaggattctctaaaccctgaagggagggattttcaatttagggatgagtattccagagtctcttactctctgcttattgtctggctgtgagtctctgtatttgtttccatcaggggcaggaggaaacttctctgatgatgactaagtgaggtactgacctatgagtacagcaaaatgtctttaggagtcactttcttgctattgttttgttttgtatagttttgtttttgtttctgtttttgttgtggaacagtagtattttagtattcggttttcccataagcccctgacctatctaacctcaggttcttggccactcaagaagaatcttgaatgggtttcatctcatcatcgtcatagagtgggccttgaatcaaatcagatattggttggtaactccaaaagctttgtatcactattgaacaaacataacttacaggaaggtcaccattgaggattgaagagtttgtaactgggttggtgtttacctttcttctttggtagagtacacactacattactgtaccaaaggcactaactaacatgtacggctgaagactataggtaggtaccagcttgacttctgcaatttcaatagttgtgtaggtgttgtcttcagcaatagggtcttattgtatgtcagtatgtagagagcaaccaatggccttggttatttggtggttcccataggatccctttggccaacaactcaatttagatgtaacccattcccagtactggaagcttcatttggtgatgagagatgtctaattgggatctgtctcccccattatttggcaatttcatttaaattgcatatatatatatgtgtgtgtgtgtgtgtgtgtgttttaggaagcctctactgtgttagacttatataccatccctcaaatggctgttagttttagctgtcccttcccatattccatcccccacaacctttttccatctccctccctgtttgataattccattccagtcttccccaatcatcaaaattatctattttgtttccccttcctaggaagacccgtatctccccccagtcccttctgtatgccaaacctctgtggttatatggacaatagcttgtttaacaaagacttaagagcaaatatccacatataaacagatagatacatatttgtctttctggggtctgggttacctcacacaggatgactgttttttcctagttctatccatttacctatgaatttcattatttcatttttaacagttgagtaatattcattatataaatgtatcacatttcctttatctagtcatccattgaaaggcatataggttatttctggctattatgagtagagcatcaatgaattaagcaggtgtagtagaatgaagcctcctttagaaatatacccaaatggtatagctgaggtagattgatttccatctttctgaggaactgccacaccgatattccatagtggctagataagtttgcactcccaccagcaatgtatgagtgctcctcttactccacatcctcggcaacatgagctgtttattatttgttttattgaccttagccatcttagttttgatttgcatttcactgctgagtaaagacactgaacatatctttctcagtcatttgagtttcctcttttgagaattctctatttagatctgtaccccactttttgttgggatatttgttttcttcatatccagttttttgtttgtttgatttttagtttttttatgtattttgggtattagtcttctatcagatatgcagttggtaaaaaaaaaatattttcccattttgtgggctgtggcttttgtcctttgttttatagaggcttttactcccattaagtctaatttattaattgttgatttaagtgcctgtactatcaatgttcagaaagtctatgtgaatgcattcaacactattccccactttttactattctattagtaaaaagtgtatctcattttatgttgaagtctttgatgcatttggagttaagttttgtgcatggtgataagtatggatctatttgcattcttttacgtgcagccatccagtataaccagccaccatttgttgaagattcggtcttttttaccattgtgtatttctggtttctttatcaaaaaaaaaaatcaggtgtctatcagtgtgtggacttatttctggatctttgatttcattccattgatcagtatgtctgtttttgctccaatggcatgctgttcttgttcctatagctctgtaacacaatttgagataagggattgtgacagctccagctgtatttttattattcagcattattttagctatcctgggtattttgtgttgccatatgaagttgaaaactgtcttttcaagttctttgaagaatttccttgtgttggaattttgatggtgattacaattgaatctgtagaatttttttttcatttttgaagtatctgctctatctcattaaaggctatggtgaaggaataatatgagaggttgctcttggtttttttttttccagaaaataattaacaacataatagaaaccaatgtcacttgatttatgttttttaaaagtaaagctattctcaagtaattttatggtagtccaacagggacttccattttaaatgccttcttcaaaaataattagtgttacttttctctctgtatttctttacaggaaaggagcccattcgtcttctataatttttatgtcacatctaattcaaaattccacaaaataaaatgtgtggaagacgtaaatcacgaaacatttatatcttacatgaagagacaaaagcattgggggtaagcactaagcattattttggctaataaatagtgctactttttactaataaaaatgtggagaagcattgatgccatttataatgagctccttgaggttcaaaatatggataaatgtgttttgaagtgaagacagttagaccagagctaactggacacacagagcatgtattcacacaccattcccaaatacttcccaacattctcccagcctacccaggttctttggaaacatattctgagattacagttgttgaagagatttgttttctgcctttgctggtaacccttgtttgaatatggtttaaaacaatctttgtagatgataaaacaaaaagtcaggtattgatctcaaatacaatgccaaaagaggctgcatagactctggagtcttgtgctgtcagcacgggcccctctctagggaataatatagtaaagcaatgctatccctctcagctctcttcaaatttagaacatgtacttattcataatacccatctatctttatggaacccagccaaaagcattaaaatgcagcacccctctccaacctctctccccagccagatcgcccacatctttctccagaatctaacctagtgactctacctgacacttcccatccatgtactttccccaacccaccagacatagcttgaatcccacatacagtagtctgaatgagtctggccacccttacctgtgccatgaccagtctctactactctgccaggacttgccctacctaagccccaatccaaaggtctctcccacaccacatccaaacattccacccatatagatccacccctacactcaaggcttagactagaaggcacatcctatacaccagcccagtctcctaagtccacctgactccattccatccaagctagtttcaacccctaggcccaagccacccacacatcctcttttctgtcccaaccttctctgtccatatcagacgtagaactatcaaaagaagttctcacgcccagatctcattacaaaaatataaacagtatgaaagatcaaactataatcttctctccaaaacctaccagagctgtagaaatgtaagcatagatgagggagaagattcccaattcaatggcacagatctttaacaagatcatagaagaaaatttccccaaactaaagaaagacacacccatacagatacaagaagtgtatagaacacccaagaggcaagaacataaaagaaaatccctatggcacatcatagctaaaataaaaaatataaacaataaaaagtatgttgaaagtttcaagagaaaatcactcacatattaaaaacccaccagaataacagttaatttctcaatgaaaacttcaaaagccgaaagagcctgaaacaaggcattccaaggcctaaaagactatgccatatagcctatactaatattcccagttaaactaccagccattattgaatgagaaagaaaaattttcataatataaataaccattaaaaattatatgcaataagccaaacctaaagaaaatacaggaagcaatattttggactatgagaagaatgagcatagcatagagactgtggaagaaaatatgaaactgtaattatcaagtacctctgagaatacaatgacaccaagaatcaataacatgatgactgcaattaatacaaacatttcaataaaaacatcaatggcctcaattctccaatcaaaagatacagactgttcatatggatcaagaaacaaatccatctatttgttgactccaaaaaatacattttatctatagacaccacttaaaaggatggataaaagtactccaatcaaatgggaccaggaagcaagcagacttcactatcataatatctgacaaaatagactttaaattaaaattaataagaagggataaaaaagactactcattctaatcaagaaaacaaataaccaagaagacattactatcttaaatatatatgcaccaaactctggtgcacccaatttcattaaaaatgtactgctagatttaaagatacaaataaacaagaatccaatagtagaaagtaatttcaataatcaactttctccaggagacaagtcatctgtacaagaaataaacagaataacatcagaaataattaatatcagacatacctataaaatatcccgcccaaacactagagaatacaaattctactcagcagtacacacaagattttctaaaatagaccacatcctgggacataaaacaaatctttaaaaattcaaaaacatttaaatcactctttgtattctatctgaccacaatgcaataaaacttaaaattgacagcaaacaaatctctaatagttacacaaactcttggagattaaataactcactactgaatgaataatgggtcaaataggaaatcaagaaaaaaaatttaaaaaatgtcctgaaactaaatgaaaataaaaacacagcacaacacaacaaaacctctgggacacattgaaagcagtcctactagggaaatttatacctcttaagtgccacatttaaaaaaaaaaaagaagaaaaagcacaaataaatgacttaatgatgcagctcaaaaatttggaaaaacaagaacaaaccaaatccaaacccagccaataacaaaagaataatgaaaaatcagggcataaataaatgaaatagaaacaaagaaaaccatacacagaatcaaggaatctaagacctatttccttgagaagataacaagactgacagacccttggcccaactaaacaaagaaaaatggcccaaattaacaaaatcagaataaacaggaaacattaaaacaaacaggaaagaaattgaggctagtatcaggggatgttttaaaagcctgtcatctatcaagcagaaaaccttaaaaaaatggaagaatttccagactcagccaaaccaccaaattaaaccaagaataagtgaagaaactaaacagacccataacaagcgagaagactgaaagaatagtaaaaaaaaagtctttcaggtgtaaaaaaaaaaaaaaatgcccttctcctataattagattgatgactaccttaaatgccatcctagtagctgatggaagcagaagcagacacccacagttgagcactgatccaaactcctggaatccagttgtagagagggaggagtgatgaataaaggagtcaaaaccatgctggcaaaactcacagactggcagctgggaaaccaacataacacagaacgaggacccctgaacatggatggtgtcagttgtggggggaggggaggggcttgggcagtctatggggctctggcactatttatccctagtgcaagaatgggctttggaagcccattcccaatggaaggatatcagcctagatacacagaagagggcctagattatgccccagatggtgtgacagactttgatgattccccatgggaggcctcagcctccctgaggaatagacaggggtgaggtgaggggatgatgtggagaacgtgaggaagggagggaaagagaactgggattggtatgtaaaagaagactgatttttactttaaataaaaaataattttaaaaagatgtccagaaccaggcagatgtacagcagaattctatcagacattcaaagaagatctacaaccagtcctttttaaactactcaaaaaaaaaaaaaagagagagagaaggagcactcccaaactctttcttcaaagccagtgtcacttcaataccaaaaccaggaagggacaacaaaaaagaaaactacaggccgatatccctaataaacatgcactcaaaaatgctcaataaaatacctataaacaaaattcagatacctgtatcaaaaagattagccaccatgaccaagatgtttcaacatctgcaagtcaataaatacaccacataagtgaaatttaaaacaaaatcacatgatcatctcaatggacatagaaaagacccttgacaaaaatctaacatgcctttatgatcaaagtcctagacaatgtagacctagagataacacactaaacataataaaagctacatgtgagaaacccacagtcaacatcatcctaactggagaaaaccttgaagcagccccagtgaggtcaagaacaagacagggggtgtccactgtccctactcattttcaatattgtgcctgaagtactagctgaagcaataaagcaagagaaggaagaggtatacagatagggaaagaagtaaaactatccctatttgctgatgacatgatattatacattagagatcccaaaattcgaccaaaaaattccagatatgataaacaaattcagcaggattcagaatcaacttgcacaaatcaaacatacagaggaagagagcatggacatactcccattaacaatagggaaataaaatacctagggaaaaaaaaaacctaaccagtaaagtgaaggacttctaaaatgaaaatgttaaacctctgaaggaagagatagataaagacactagaaaatagaaaaacatcctatgctcacagatcagtagttgaaattatgaaaatggcaattttaccaaaagattcaatgatatcccaatcaaaatcccatctccttcttcacagaaatagggaaaaaaactattctaaattttgtatgtaaccaaaaaagaatctggacagccagaacaatatgagcaaaaagaacagtaatggagatgaattgctattccagatcttagatatattacagagccacggttaaaaaaaataataatatggtcctcacacaaaaatagacctgtagatgtatgaaacaaaactggagacccaaacataaatacacataactccagacactttgataatgataccagaaacataagctataagggagaaagtttcatcagaaaataatgctgagaaagctccatgcccacattcagaaaaatgaagttaaatccatatctatcaccttgcacaaaacctgactgcaaatgtatcaaagacctaaacatgaagcctgaaacttccagaagaaaaatagaagtattctacatggttcaggtgtaggaaaggacttcctttataggactccatttgcccaaaatgtaaggtcaacagctgaccaagtgggatttgatgaaagtagaatttttctgtgtagctagagtcaaccaggtgaacaggaagcccacaggatgagaccaaatgtttgtcagctacacatctgacaaaggattgatatccacaatatataaagaactcaataacaaagaatcataaaatcaaatgacccactcaaaaactaagcctgggaccttaccagagagttctcaaaagaaaaataaaaggaaggggttaaaaatatgttcactgtttatagcagttacagaaatgaaaatcaaaacaactttgagatttcatcttacccgggtcagaatggcaaagaacaacaaaacagccaacaacaacaacaaaaaaaaaaattctggaggcaagggtaaggatttggaggagaccctcatacccttattcactgttggtaggttgcaaactggtgaaaccactgtggaaatcagtctggaaaattcccaaaaactaaaaatgaatctaccatattatccagctctaccactccttggcatatacccaaagaacttgacattcttctccatggacacttgctcagccatgttcatttctgctctattcacaataggtagggaaatccaaattcccttcaactaacaaatggacagtgaaatgcgatacctacatactgggatactacttggctgtaaagacaaacgaaatcatcaacttttcagttacatgaatggaactagtaaggatcatatcaagtgaagtaatacagacttagaaagacaaatgtcacatgttcattggagactcctagctccaaatcttcagatgtgggtacatagcttggagtaaccacagaaaccaggaaagtaaaaaggataggcaatgggaggagcaacagagagaggatttgcgggtataagtgatctggttagagaaatgaggcaagataggggactctaattagggaaggtcagggagttaaatacagaagaaggagggatgaagataaaataaccattaggatatcttaaagtgttgcaaagaatcataactatttaccccaaaacaaaagctatgatgcacataagtctgtggatagacatacatataatatagtttaaatgaaattctctcatctgaactggcaatgcgccctccaagagccaaagacaacctaacaaaaatcccaccaccaagcatagaaactttttttgagtttttggtcagggctgtcccaagaacactgaaaacatataagctgttgtatggcccttagttacctcccagaggagtaaggtaagtccctattgatgaagacaccatgcacttcagacacagggccagagcccctgagctgaaactgacctaatgcctcctccatgaagattaattttataacagcaaaaggtactatgcaagggtcaaaaggagggaaacaaccaacagtcctaactagctgtacacctatgagtcacaagaatggcccgcatagcatacgaataccttggtgataaccaacagctctctaattggacttgaaacccactaagctcatgggaaattatgcctggtactgccatactacccagggctagtaaagtcataagtcttggagggggaacatctactttgcaactttattaaaccagcctaatccctaactacactgtaaatctgtatccttatacccacaggtaaatttagttttcacccctcatcaaggaatcttctttttgcaacagatggaaaccattacagaaaaccataaccaatcaaaacgcaaagttgaatcatggagtccagtcacaatggattcatcttacataacaacgcccacacctaaggttcaggaaagattgtagaagaaggggtgaaagactgtaagagccagaggatcttggagtttgctctgagactgaacttaaagcaagtcagtggctcatgccccaaaaaggagctaaaactaaaagctatgggaatgggttagtcatcaaaacccagcccgcacctccatttctatctatctgatcaaagcaaaagtcaccataaatgaatgactttatattgtctctaggctcctattaccaagagaagaagagcctcatatcttcttatctttctggtatgtttactttacatgccaacttgcctagccatgcacgagaggtcaggtagtattctggctatcctatgagtgtgtcagtagatatgattaacacctaaatcagtgggctttgagtaaagcagattaccctccattgtgtgagccttggagggagaaaaggaggcaagaaacgatataatctcaatctcaaaaatagaagaaatagttttttttttaaaggagtgtcaaagatttgaaaggagtagattctgaaacaatgaactacttctttagcagtgtttatcatagctttcaaaaagcatcctaaaaggctgataggattgtgatcttttacaagttgagactgctataaatccaggctactgtgcaagctgcatcacccctgtgctattgagtccagcagttccaatagtacttgaaatgttggtggctaacatggggtatttttgaagcctccggcagacacctacaaattcattgcagtattttatgaaataaaactccatgaatgtgtcattctctgaatacaactgctgtccctttgagaaacatttggccttctactgcacctgcatacaaactgaatatttaatcatgggccaccaatttactacacaacctgagttgctcattgagagttgattattacctgacctaccgagccacgagttgggcattcacagaaaaaactccatcaccaaatggacataaatttacagtcaaatccaaacaaacaagacatggagaaacagcctaaacaccctttgctcttactaccttccctcatccagcttctacctgaggcccaatggccctattatcagttaaaacaggaaaatgtaattgagacctgatttatatatgattatgcctgatctccaagaatctcccaaaagtagataatggcaatactagagcccccaactgagttacccctgaaggagaaatatgaagggaaacctttaaaagatgtataatttcaagcattacacctgcttgcttattttgtataggagaaatgctaggatgtatggtcagatactaacccacagctacaactgtgatggtatggctacatggtcagaaacttgaaggaaatgagactgataaaccagtaacaagtctaggtgtgatagcattaatgtcaccctgacagcctggggaatcatggggttgggaaacctctgaacactcctgcctgcagaggattattttgactgtgtcaattgagatgggaagatctggccactgtgaggtggtgtcactcctggtcaggattctgtaccgtatgagtggaggaaaagggctgagcaaagcaagcatctgtctccctctgctttctgaccatgggcaaaatgtgactagctgcttccatttcctgtcactgtgactatccagccatggtggactacacctttgagctgttggacaaaagaaaccttttctctgttaaattgattttgtcaaagtattatttttttcacagcaacagaaaaagtaactatgaccctaggaaagtgttgttcaaaatcaatctccaaataagcaaaagaaaattgaagatatttgcatctcatgccagccctcagcaaagggcatcctcagtagagaaaggctttagcaatcaagtggagaggatgacttgagctgtggatgcctgccttagtttgctttctttctgatgctgccatgggaaaataataacacaacaaaaagcaacttggggatgaaagggtttgtttggcttataggttacagtccatcaacaagagaagccaaggcaggagctgaaccagaagccagggaggaacactgctcactagcttgttctttgtggtttgcttcatctgctttcttttatgttttattttgttttgtcttattgatagggggtttctctgtttaacagccctggctatcctggaactcactctatagaccaggctggccttgaactcacagatatccacctgcctctacctcccaagtgctgggattaaaggtgtgtgccactaccatcgagttcaacccactttcttatatacccaaggaccacctgacctgaagtggtctctccatatcaatcacaaaaaaaaagccccacgtgcttccccacaggccagtgtcttggggaactttcagctgagagtatcatctcagatgactcccgtttcaagttgacaaaacactaactagcacaatatcaacccatctctttccccatctctgtcactgctccataggtccttagctaggttttgggcttcacgaatactatttttaaaacaaggcctagactggtttagtctacagtatccaaggtcaacactgggtgtgggaatgggcaggattagggacactaaagttcaagtcccagacaagaggggaagagagaaacaattaaggagaggtcaaaagtccctagctggttttatgggtgtagaacaagaaagatagatcttctgactagagtctgcctaaagatccagcctatgagggagcgtgatactcagaaagagactttcagatccccagagtcagcagttctccttttaccatgacatcctcctgagaagggcagatcaacaggcctctgcttttcacttaactagaaccacctacaaaatcaaaataattatccttgaaggctactattattaaacaaaatccttctcattcaagcaaagaagatccaaactacccaatggtggctgccacaacagtctccactttggttcctccctgacatgtaattctttcaatactcagggatagtgaacactcaccatcctgaaacaaaaggtttagcagcacagtggaatggtgtcttgggtctccatgactatgtcattgtcctgcagagactagagccagcatcttattgattgttcttctctggagagccttgagtaatatactaatatactcggcaaactgaacatgttcaagacttctcagcaacacagactgaaacaatccttagtagattcagcttggttttctcttctcacaggctgcacagataatgctcggcctaattcaaattgcactggggactctctggttctttttgaacgagctagaagataagaatcacactatcggttctacctttatgatacttgccattagttacctgtttgcatctggagcagctgtgagtaaagctcaacccactttcttatataccctatgaccaccagatcctaaagcattagtgatttttatttatttggttctaatccattaatcaaagtatgctactgtcaacagtgtactagactcaatcacttacagtgctcacttgagcctggaagagttgttttgtgtgtttgttgcctgttttaataaatgtctcaagaggctgaggtgcacaggtagaaaaggtatcaaaggaatagcattcagaacactcacaaaagccgtggctctttagagaacaaccagaggcctttcttttcgaggtgaaaacccaaaagcataagtttaatgtgtacggaattagacgcaggtttgggggaaattacataaggaaaaagaaaaagaagagtcctggggacccaagaggagttgagggaaattaaacagaggttcctaaagtggatattctaataatttcttgggtatatttaccaaagtgcccaccaggagcacacccaagtaaaagtaattatactgagggaagcccaaagctatgattcttccccagctatcttagttcacagatgcactcaatccagaagaaatttgttgatcagaggtcatttatgcagaagtcatgaggcctagtgacacaactgacttccctgtgaaagcaagtctccagaagcagaaagctcaacccaagggtgagcttcttcacagagaacagatttcagtaaatctgtccccaccttctttttctcctctaccaaagtggagctttaaaagagtagaggtctgagtggagcccagtccctgagctttgtggaaaggcttcagagacatgcaagtagtcatttcactcagcaggggtctgacattcacttctttgactggcagacatttcctcagagggctcacctctgaaggcactgcaaaactgacagctttctgggaagaagtgtgtataatcaagaatagtgacttaaactggaatggtccaatgagtctccaattgcaaaatgtctagattggagcctaatagactcaagacataaacaggaagcctatggaagaaattaaccacaaataatattcagtgatgtatctatcactacatcaagcattttacaatggcatttcaagcttgttttccctattaccacaaggaccaaatgcagtagctctttacatcctgatttataaatgaggaagccaagttctgcaaagtttaaggaactctgacagagtgcaccacacacacatacacacacaaaaaaatgtttcagggttttctttagaccaagttaagatgcctctgctttcataacaaattgcaacctcctgggctgggatattcttgataaccttgttgggatatttaagtcatcttttgtaagtgctgcaggcaaatggaagaaatagcacaggaagaaaagttaattctgaatagtctacaaatcatcacactctcagctagtttcagtaggccccagacagcacagtgcttgagaaaaacagccgtaaataaataaacaaaataaagccatttgatcaaatgttttctgaaacatttgcagttatgggttttcccactagaatattatgaggggagggaggttcctatgaatgaaagctgccacaatagccatcttattttctaatacttcatgtcattgacttgccactgaccagcaaagcaagccaaagatccactatctgccccttgtaaaattatttttttccaacttttttttataacttgaattagaaacaggattgttttacatgacaatcccagttcccttctcctacccgtcctcccctactaccccccccaactaaaaccttatctgtcacttatcttttctgctccccctggatggtgaggccttccatagggggtcaccagagtctttcgtatcttttgtgagccccttgcaaaattattgagaaattcccaagtgccaccacctacttgctgatctcatgaataataaacaactctttaagccttagctgattgtttttttaagatttgtttatttttctatggactggtgttttgcctgcatgtatgtctatgtgaaggtgccagatcccctggaactggagttgcagatagttgtgagcttccatatgggtgctgggaattgaacctgggtcctctgagagaacagccagtgctcttaaccgcaaagccatcttcccagccccagatcaaatgtcttttcatctctctaacagaaaaaaagtagaattatttttttagggaatccctaaaaaacaaaatagattttttttatttcaacaccactttcttcataaaatccagggatactctaagcatcagcatgacactgacattggaaagaaagtctgttgagggggtgaattatcctatgcatgggtgtttcaatacttatttctacccacagttcctcagctcaggattcagcagtttattccatggttgtgcttcgttttgtaaggtatgtgggaaagctggacacatccccaaagacaaagtgttacatagcacaaagaagatatcgatggttctgagacatgatggggggggcgctcttccaaacgctcagatgaaaaatatcacctaacttttttaaaaatgtgcctcagtgtatcttttgtgagaatattgaaaaggggtgcctaatgagcaaataaggagagagctgtgagagttttcatggaatgaatccctacacggcatctaaagggagttgtcaatcacaaaacaaaactctccaaggagagagagagaagttaatgaagtttgaaggtttttagtcaatatctcagttaggtttctattgctttgataaaacaccacgaccaaaagctactcagggaggaaagggtttgtttcatttcataacacttaggtaacagtccatcattgagagaattcagggaaggagctcaaggcgggaactgaagcagaggtcaaagaggttccttgaggttttgttagcccactaccttaatagaacccaggaccacctgcccaggactggcactggccaccctgtcatgtgctggtccttcctacatcaatcagtaatcaagagaatgccctacatacctgcctagagaaaaatctgatggagacagtttttacctgaggttcttctccccagataactctagcttgtgtcaagttaatgaagagtggggaggggagctattaagaaagagggtaagaaaaaataacacttggaaagagagctatcttctgtaaacccagatccatgaaatatcacctggatatcagagagagagagagagagagagagagagagagagagagagagagagagaatcaggacacctccaatgaggaacagtcccttactcatttagaatttccctcccaacttttgccagccccttgtggttagtcgaagctctggaaactcacatacatggatactggttctgaagaccccagtgttaatctatgtgaccctgagcaaaatgcttcactgtgcatcccactgatctgaacaaacatggataacactagcaagctaaaaactttgtttgctatttcagttaaagatagatctgtctatctttttcccccaaatgtcagtggcatgagaggctactttgctgagaaggagcttggcaactgttattgtggggaatcagggtttgggtgtcttacctttttaacttttaccataacctcggcagccactgttgacatcatcttccttcctagaccttgttctaagctggtgaccccaaagtatctgccagaaagtgggcgtgggactcaacatctggtgttactcctccagagcaatagcacaattgatctcaaagccctggcagcactcttgagattttgcaagttcctgacccaataccagctcatactcagtttctgcctttgtatgagttccaaatttgctgtgcagcaaccatggcaacaggtagaagtaaatatggcccattggctgattttcagaaaactcacctagcacgttggctttttctcctgaagcaaggaggtatggagagcctgactgtaatttccaagacacaatctccagccttttgcagatccaaacatctctgtatacctctttccccttcatagcacctcaaagagaaaagcctaagatttccctgtgcaaagccagcctggatccttatctagaagcagctggcgtcacccctcggcacctctatttcatattcagataagtttaccaccctttataaataatcttctttgtggaaggaagaaggagatgtaacagatgcttcttcttagaatttagggtggtttggcttggtttgtttggtttggtttggtttgtcatgacagggtttctctgtgtagccttggttattctaaaactctctttgtagagtaggctgacctcaaactcacagatctgactgcctctgcctcctgagtgctgggattaaagatgtgtgccaccatgcctggtaggatttagattcttaatccttaggagaagtatttcactgggagagacatagccaggataccaagggactgaacagagagatcgccttctggtttccacagcataagtttaccaagtttctttttgttttgggttttttttttttttttggtggtggtggtggtatttgtttgtttgtttgcttaaattaattttatttttctccatttttatttaaattagaaacaaaattgttttatatgtcaatccctgttcccttccccaccccttctcccctctctcccacttatcccataccatttctgctccccaaggaggatgaggccttccaaggggggggggtgttcagagtctgtcacatcctttgtgatagggcctaggctctcccctgtgtgtctaggctcagggagtatccctctatgtgggatgggctcccatagtccattcctatgctagggataagtactgatctactacaagaggccccatggatttctgaggcctcctcactgacacccacattcatggggtctggatcagttccatgctggtttcccagatatcagtctggggaccaagagttctcctttgttcaggtcggctgtttctgtgtgtttcaccacctggtcttgacccctttgctcatccctcctctttctctgcaaccggattccagttcagtttagtgtctagctgtgggtatctgcttctacttccatcagctgctggatgaaggctctatgatgtcatataagtactcatcaatctcattatcaggggagggcatttaaggtagcctctccactgttgcttagattgttagttggtgtcatccttgtagatctctggacatttccctagtgctgatttctctttaaacctataatgtctccctctcttatggtatctcttattttgctctcctctattcttccccctacacaaccttcctgctcccttatgtcctcctcacccctcctcttctccccttctcattctcctagttccctctcccctccctgtcccatgctcccaatttgctcaggagatcttgtccctttccccttctccgagggaccatatatgtctctcttagagtcctccttgtttactggcttctctggcagtgtggattgtaggctggtaatcctttgctctatgtgtaaaatccatatatgagtgagtacataccatgtttgtctttttgtgactgggttacctcaatcagaatggtttcttctagttccatccatttgcctgcgaatttcaagattccattgcctttttttcccctctgagcagtactcaattgtgtaaatgcaccacattttctctatccattctttagttgaggggcatctaggctgcttccaggttctgcctattacaaataatgctgctatgaacatcgttgaacagatgtccttgttgtatgaatgtgcttcttttgggtatgtgccaagtttctttcagtaaaaattaaccaatgaagagggcactaaggagatgattcaatggttagtgggagtggagttcaggtatccagaacccatataagtgccaggtgggctttgtggctcacctgccattacagcccctgaaggtagaggatccccaaagcaagctggatagtaagaccaacctgatcagtaaattccgggtttggctgggagaccacaccttaatgtgtaagatgagtgattgaggatgatacccagcatcagcctcaggcctccacatgcacaccacacacacacacacacacacacacacacacacacacacacacacacacttaaatctgtttcttctatccatggctgttttttttttctttttacatctattacagattgtgttagcaattatattgaatatcgtgagtatcttcgtggctattattggcatgattatatttggcatattgttcccagcttttgaagaaataggaactgagtacatttggtcagttgtaagtaccattttaatgttaactagtaatagtgttagatataactgaagcattattaataatggtacaatgaaattgctctaagatacatatggatagaagaatgatggtcttgaaattgccaagaaagtctagaagtcacatgattgttggaaaaggccaaagaacttgtttaagcagatattaaagttattattgtgatattgtaataaaattatatagtctttaaacaaaggaaaaactcaccaaataacagcataaagagttgaaactggaggcaacctgagctacacatcaagatccctatctcaaaaaaacaattcatttttgagaatttcagtcatgagtacactgtatttaaatcatttctaccctcacctcttattccagtccctctcttctcacctgcctcatggcttcatgacctcttttccttcagtcattattgtttataaactattgaatccatttagtgtcactcatatgtacatatgtttagaactgacgatttggcattagataacctatcaaggattatccaagggtatttctggataaaactgattttccctaccttagcagttattggctgcctgtggagttggacttgtgaaatttccttggcatgtcagctggtgttgttttgcaagtcttttctgacaaccatattgttgagatgtcatgggtgcagtttccctgtcatgtccagaagacactgtcccacagcagagttctgatcctttgactcttacaacatatttatttatgggatggagtcatatcagtcaacatgggaaaatgaaacttaaataataccaaataaatgggatatctatttcaaagaattttaagtagccacatagtcttgttgtgtagaaaagtaagtccaagataaatatataagcataaaattatgaaaatcaccataaaagttatgtattaacaacatgaatgagaaagaaaactaggaaatgaagggaggaaacttaaacattttgagttgtaaatattttcatttttgatgtaatatagcctgagataacaatagctaaataagtgacatcactgctccagagggctgagagagtgaggtcactactccagagggctgagagagtgaggtcactgctccacagggctaagagtgaggtcactgctccacagggctaagagtgaggtcactgctccctagggccaggagagtgatgtcactgtcccacagggctagaagagtgaggccactgtctcagtggacaatgacagtccccagaagaccagaagacaaggctagtgagaattattctcaggcctttaaatctaccaaaatacagctccactggattgtagacttgaataagccctgtaagcttttctcccttttaatttcccacttagggagtgtgtcttctgctgctctacccttgtatcttagcatcaaatgacttgctttctgacttcataagtccacaggtgcagagaaattttaccccctactaaacgacagtatgagtgtctcctacaactgatttcaagaaggatttagggtttcttgactgaataatagttagagaaatttgggactcgcaattgatgctgtaataagttaaaatctggggagatgttgagatgagatgaatatttttacacatggaaaggacatgaacatggagggactagaggcaaatggttataggtcgaattgttttgttttgtttttcaacgtatgtggaactgtgacattttcaatgaatgaaatcattacagctataattagttaagttaaacccaggtcacactggagaagggcaggccatatcactggtgctcttgtgaaaaagcaaggtggtgcatgaaaagacggccatgtgaatgcaaagacacatggaatgatgctgctgtaattcaagaggcgtacagaaccagaagagggaagtaccctcctgcagagcatctataaggagcatgatcccaccaatacattgatttggagcttttagcctccagaactgagacagtcaatttctgttgtagaagccattcatgttatggtgttctatcacaacacacctgggaagctagcacaggaggccagtagattgctgtctacttctccagagcttataactaaagacaagacacaacagtaaaacaactgtgctaagacacaagaatgcacacagagttgtcagcttcatgactgatgatacctctgaaatcctgttcagtgagtttgctaacactgactcttttaatcagggttactatggttgtgatgaaacaccatgaccaaaaacaacttggagaggaaagagtttatttggcttacatttccactgcactatttatcatcaaaggaagtcaggacaggaactcaaacaggccaggaacctggaggcaggagtggatacaagaccgtggcggagggctgctaatgggcttgtttcccatgctcagcctgcttccttttctttttttaattaatttttatctaaattaaaaacaatcttattttacataccaattccagttccccctccccaccatcctcccattctccccaccatctctccatctcacctcacccctatccactcttcagggagggtgaggcctcccatgggaatcatcaaagtctgtcacatcatttggggcaggactcaggccattcccccgtatctatcagcctgttttcttatagaacccaggaccacctgcccaggggtggctccacccacaatgtgctggacccacccatatcaaacactaattaagaagatgtcatacaaacttgcctacagcccaatattatagaagtattttctcagtacttctccaataactctagttttcggtaagttgacataaactagccagcacatctatcttcatggactaaatccatctgcctatttaaacgaatgcttccctattggaagccagacaaggatcagcaattgaaaaaagaataggactttctaaacactattcattctggggcaggggaagatggaacccaaaagaatctgattgacctatttcactatctaagttctccctctttccatgagctgagagagaatagcttcatcaaattcatacagtaacacttagagaagggcatgataaagaaaacagaatatactgaatagcataaaacacagatcctatggtcaacctcaccaaaaggggatgagaaaaaggcggttactctgctctgctttctctactttccagcctcattatgtgtaaagtggaaataaaagttggggagctggtaacagaattaaagtatttaatgagagagccactaaatatataatgaagcaactaatttgaaatggccatagctgtttggagctggaagagtaaatgatgcaatgcttttctcaaagttcttggagggttttattcgcatgagtaaggtttcttttctacctcagatggctggcgtgatgcttctgcagatctgtattttaaataccatgtcagagctggtcattgcaatgataatggtccgcttgctcagaaatgcgctacgtaataaatgtgagtaatggggaacagggagacggctcagaaggtaaggctcctgatacacaaacatggtgacctgaattccagtcccaacttgaatgagaaagaaggtgggtgtggtagcagatgtctgtgaccctccctggggggacagagatagctggtcagccagtcttagctgaaacatcaagtgtcaagttcagtgagagatcgttgtaaaaataagatggagaacaacatgccaacatcaacctctgccccccccccaggaggctgaagagaaagagagaaaagcaaaagaagctggaattgtattggctgggggcagttaagaaaatctataccaaatcattagcccactttgccactttatcttaaatatgcgactttcaacccaaactttctgagatgtgtaaataagtggcgaagcatgctgttcaccaatggagaaaatacatcaactaattttcctcccctagggaagcctcaaccctggacttaaacagaaatttttcattcagctattttaaaagttcatcaaaagaacaaaaataactgggtcataaggtagattgactcccaaatttctgaggaaccaccatattgatttccatagtggccatacaagtttgcactctcaccagcagtggaggaatgttccctttattccacatcctcaccaatatgaactgtcatgtgttattgatcttggcaattctaataggttgtcatcttttggagaagtgctcttttctgaagaaaaatggaggaggagtggatctggggaaaatggaagggcgagagagctgggagtagtgcagggaggggaaactgtggtcaggatgtaatgtgtgagagaagaatctattttcaattttaaaaaaaagaacaaaaataatcttcaaaaaatctaaaagtatatcaatccctgatctaaaatgaaataaagacaccaaaactctttaggaaatatcagaatcccaaagcagaaaattacaatagcaaatctgaaaattttaatgcaacaagaagatttgagctgaaaaaacaccaacttgaaggtaggtcaatttcaattatcatcagtgacaaaggatgaaaacaaatgcaaaaaaaaaatgaatagggcatcagacaccagggaaacaccattgggggtgccaaaatgtgcattatggggatcacagaaggagacagagagagggaaggagaaaagggcataagagccttcaaagaaatggtagaacgtgtgtagctataaagagtatatttttaaagtctcaaatcaaaaacataactgtaacaataagtctttactccaaccacccaagccccgccaccatttaggtgcccagaataacacacaagagtcttatattagtttacaatgctgctggccagttgattacctgctagctcagtcctaattatcaaccataaccataatctatatattttataagacttaccttaatggacgccagcgacaagcttcttctctggcgggatcacatggtggctccagagcagagagtaagagaaaaggaaggacttccttcttgtccttgcttatatatgagtctgcctgctatgtcacttcctgcctggatcgcaagacttctttactatatttcccagaatcctcctcgactcctagtcccgcctaacttgctgcttcattgaccaaacagtactttattcaacaatcaataagatgaacatacacagaagtacattccttatcacataagtttcttctattgaaaaaactacaaaatgactttaaaaactaagcttaatgtgagataatgaaaataatacctggggtaaaaataaatgtagtactccatacaatacatgcatataaataagaaaaagagaacagggaaaacaaatcaaaagtatgttttattgtttaaaaaacaaataaacctttagctgtatggacaaaaagggaaaaggagatcaagtttaattttctaaatgatcaatgaacattagcaaaaatattaaagaaatataaatactgaagtggctattaggaacaatggcatgccagcaagccagatagctgttctagttttacattctgttgctgtgataaaacactgaccaatttggtgagtaagtaatcttttcaaatgatactgggacacctggattttcaaaaagaaaaagtaaaactaaactactaccttacacaagctacacaagctaattcaaaatgcacaaagaccttggcttaagagttaacactgtgaaactcttagaagaaactataggtttaattctttgtaacctacactaggtaatggtatatttgaatacaacatcaaaagcacaaatataatttagtgcctaaattgattggctaaggaaagaaaacagcagaggcaatctgatgaatatagttgcaaaaaccctcaccaacaacaacaagacagtctcccaaagcagaggcctgagatatggctcagcagttaagagcagttacttgtgaagacccaggttcagttcctataggccacatagagcagctcacaaccacttgtaactctatccaagggatcaaacatcctattctggcagtgtatgcacatgtttcacacacagataagcaggcatacacactcatacaagcaaataaagatacattgattttttttaattcttcaattaccaaatcaagtccaataacattttaaaaagtttatataccctgactccgtagaatttatcctaagaagtcaaagttaactaactcataaaaagtaatcaatagaacacactacattattagagaacagaaacatagtcgctgaagaatgatagtctgtgtacattgattgtaatggtgatagttttagtatcttttcagcttacttaacttttttcaaaatagatcattaatctcaaaaatacctatattcttctatcaacctaaatcctgcctgggggaagaagggtgacagttgccaggattcctatatgaaaacaaattgaatggggctggatagtaaatggaggtagatcctgaggggatttaaccaggtgatttaagaatgttgactttagacagtgggtacctggggcccttaaaggactttaacgacagtcctttctcagtcaaacttttttcctaatattcattggactattttctgtagcaaattacaggtgcccacccctaactcaaattgctcaaccaatcaggaaagactgcatctcttagaacagcaattccaaagttaggaagactttagccttggttggtacaggactttcttctgttcttccgccctgctatctgcatccttatcctaagactatttcactgcatggtcccaagatggctcaggaaacataactcctggtcacatccttcagagactggctttttcctctgaaggaacaggaaacctctctctctctctctctctctctctctctctctctctctctctctctctctctcctccctccctcctccctccctccctccctctctgatgcaactgcctctggcctatgtctgaactaaataatagcaaataggatgggactgacataaaggggttaaataaatcatggtggtagagtgattgtgagggaatccaccagtttccaagtcattctagaaggaaacaagaaagagaaaacaaggcattagacaaaacaaggcattagacaaggatggaaggttccaacagaccagccaagtgatacatgtctaaacttaaaccatgccgaatacagaaaggaatataagtttgacagacaggcagaagacagacagacagacagacagacagacagacagacagacagacagacatgtgtactagttttgcaatcaattttcccaggcaaccagagctatagattactcagcctttatttatagttcccattccactcaagagttattgaacatagctttgaatacttaaacttaatagattaggagatggtttcttaaatattcacattttagggggatttttgtgtgccttcctcagcataatattccttagtgcatttaaaggatacacaaaaagagtaaaaagtttttatgaagaaaacaataataataccatctccctttggatgtgtctagtctcaatttctgttgctttggtaaaattccctgccccaaaaatcttaagggagaagagttttcttggtttatcattgcagggtgcagtccactattgtggggaagtcaaggcaggaacttaaagtactacaaccacagtcaaaagccgagagagaataaaagtatggagccttgtatgcttgctgatccaaggcctgacccatgaaatggtgccacctatattcatgatggatattcccacaacaatgaataatcactacaactcccacagacattcccacaaacaaatccgatctagataactcctcaactgaaagtctcttcccaggtgatactaggttgtgtcatgttaacagttaaggctagccagtgtaagatgtcttctgcatggcacccaagatctctgaagctgagagagccccagaacatagcagaaagttgaagaccttttcaacagactaatgctttgagataatggagttgctgcaactcacagaaacctgtgaggtgaatatgatgcatatatgtatactccagcattcaggaggctaaagcagaaggatcatacattctagaacagcttgggctacatactgatagtctatccaaaagcaaacgagccaagtaagtaattaaacagtgcctcatataccgtaaatccaagggtcaggcagcctttgacacctccctcgggacacagtaaattctgtctttccagagttccactctccctgcttcaggttttcatgttcaaacagttgttgttcagtctagttttgagttgatgactcaagacaagccttttatctttaagatgatactaattactgatttgctgtcactcaactttccctaggtccttgcacttcagaatactctttggaacccccagctccgtgtgaattaagaagattctctgcatactgccagccacagcacatgaaaaataggaatgttgtgattctgtgaagaaccctattggttttacaagacgcatccactataatgatatccttgccagttctcactttttcctagttccttaataaaggatgcaatttgatcacaagttggctcttcccacactgtcttagtcaatattctattgctgtgaagagactatgacccatgtcaactcttaaaaggatagcatttaactggggctggcttacaatttcagaggtttagtccattatggtggaaacattgcaggatgcaggcagacatggtgctggagtattctacatccagatccccaggaacaggaagaagacccactgtgttaggataaagcgctaggggaaccttggcggattccacggcaggcaagggtgactggggggacgggggacgacatggggacgacaaacatgtcaggcagacagagcttaagtgagaagatttattagaaaggggagggaagggggaaggaaagagaagagaggtaaagagacacagagatacagagaggacagaagagaagagggagacaagaaaagttctgtctgccccaggggaacaacagaaaagacagagggaaagagaataagtaggtggggtgtttcttttaaaggggtcctttacacctgcgaccagactagtagtcatggaactctggcctgaccagggtactgcctgagtgcattctgccaggtgacaggggctgaccagcataatgcctgaatccttacacgccaggcctggcttcggcttttgaaacctcaaaacccacccccagtgacactcttcctccaacaagacaacacttcttgaactgttgaaatagtgccgctccctaagcattcaatatatgaacctatggaagccattcttactcaaacagcacacccattgtagattaccaagctcctctacccctaagatttggagcatgaagggaagtagaggtgactgctcatttttatctcagtcggtggaaaacgttatgaaggaagagaccctttcattgcagagaagaaaattctagctttggaagaagcataacgttgctgtagcagaaagcaagactcttgtttctctacactactgctgcctcgactatagagtagaccctagcccatacagtaaaaaggagagctacatgatgtctttaaaatagaacagctcatacctagcactccatcaaccgctgacattatcattcattagctctcattaatgtaacaaccatagtgattcaagaaaccagaagaaatgtttcctatttcccaatactggtgatcagagtccatctctgaaagctagtggtgtgatcacttttagtattttttaagcctccaaaaagtccctgatagctttctgtaagagactatgatgggtttgtgtccctcaataaaaaaaaaaaaatagatgttgaagttttagtacctggtacctcagaatatggccttattcagaaataaagtctggggctagcaagaaggctcagcagatcaaggtgcctgatgccaagtctatctgagtttgatccttggaacccacatggcagaatgaaagaactcctacaagttgtcctctgacctccacatgtgtacaatagcatgcacataaatgtacaagcacagaaaaaaaaattgttttgttttttcagacaaagtctcacggtgtagtcctagctggcctagaacttagcatgtagagcaggctggccttatattcacagagatccacctgcttctgccttcccagcactgggattaaaggcatgtatcgccatgcccaacaaacaaataactttaataaaaataaagtcttagctgggcagtggtgacgcatgactttaatcccagcactccaaagacagaggcaagcaagtctctgagttcaaggccagcctggtctacaaagggaattccatgatagccaaggctgttttacagagaaaacatgtcttggaaaaccaccaaaaaagaaaggaagggaggaaggaaatgaaataaaactgtcataatagtaaggcctaacccattacagcaagttctcttttaaaagtggggatttggacacagagtcaggcaagcagagaagggagatgatggggaaacacgtgcaagaggactgtggaaagggaatgatgcatctactagttgagaatgtcatgatcagcagaaaaccatcaaaagccagaaagaagagtagaaagggacctcctagcagagtatttaacttttgaaaattgcaacatggcattgtcagctacaaatacattgggccaagttcacagctatcctgggatgcatgtggccttcagaactcacctataacgatgcccagagggagcctgatgtagataacatcttgatctagaacagtgagatggtatatttccattgttcttagtcacccagtctgtggcacttcaccagagagctcctggaagcaaagataggcaccttttcactccaagctgcaccatgtttgctccagaggggcaggtgtttacaaagggagattaccttctcaccagggcatcccacggtgggaaagtggcgtttgaattgctcttctttccaaagctgagtgagaggagaagctgtaaagctggtgggtgctgcaggagaatgtcatttcccactgctaggctttgagatagaagtgagatttgctggccagctctagaaaaatcatgacaagatctgtggatttcaaggcattgttgctcagtcattcaaggagactcatggatcaccttgaaattcagagcttacgagaagcaaaaagaaaacccttcctccttccttcaggccccactgtggaacactggtgggagatgaggtcagaagccttgggtttcctgagaatcacagaagcatgtggaacaaagcatgccaaagcatttccccaaaacgctgcactggtgcatcagtaccaatatgccgcaagtcgtcagaaatgccaccagttccactgacaaatgcttacccctagaaccctccagaatcctgcctagattaaagcatacagtctacagaaaggccatattctgacctgtgtgtgtgcataggtgtaacaggctttctctgggctgccaaccagctcccaaataaagacacagagacttattattgttaattatgaatgctcggccttagcttatgcttgtcccactagctcatataacttaacctgtttctcttcatctatgttttgcctcagggctttttacctttctttcattctgtatgtcctactttcactgcttcctctgtatctggctggccctaggcatctccctttctttccccctcattctctctcctctcttccctctccagcctagatttctcctcctactccttctctctgcccaccaaccccacctatccctctactcccagctatcagccgttgagcttttactagaccaatcaggtgccttaggtaggaaaggcaacacatcttcacatcattaaacaaatgcagcataaacaaacataccacaccttttacattgttatatcccataacacataggtgtatgctctcttgtatacatacatgtgcccatgggtgtagaggccagaggacagcatcaggtatcatgcttaagatactatccttcttgggttctggtacagggtcttttgccggcctggacatgcccaagtatgctaaatttactggctggtgggcccagggatcttcctccctgccccccagctgagattacaagcacatggcaccacatgctttttttttttttttcagcataggttctgagacttgaactcaaatcctcaagcttgtaaagcaccttatcaactgagctatctctccaaccccacagggactcaattgatctttaaaagaatcaacaaaggcccttttttaaatattcatatttgtcattcactatgtatatttaatactttataacaacaaaaactgttgtgaatactacacatgtaatttttatgtttggaatttgccttgctacctctcagtttttctgtgacactatctccaagttatagtgatatattatttatgatcttataaagtcactgaagatcagaatgcaaagcagccagccactagctcttacctctaccaaggctaaaatggaggtcctgtcttccctgtgactagaaactaaatctcttcctgtccgcaatgtggctggagactaattgcccatgagacccttttcttccttatatacctctctagtgctgggattaaaagtatgagctctgttactcttttagactgattcactctcatgtagtcctgggtggcctttaataggtttttcttttccttattttttttcatgcatcagtactttatttctgaaaaaagaaagccacaaagatgggcaaacattggcaaattttatgatataatgtgagaaaatgtttattacaaagatatttgcattactagcagatctgtctttaagagtgttgacattttggttgatttttgaatggcctgtaatggagtcacggttttgccttccagccaggttggcaggccaatttacagatcagagtcttagacacacagaaaccattatcagccctggctgagaatccctagggagggtacaggtttttcttatgttagataaagccttccttttttgtattagacaagaaaggggacttgtggtgatacactgtttactatttgaagatcagaatgcaaagccagccacactagccacagccatagaagctgggcagtggtggcacacatctttaattccaggattcaggagaaaaaaacagatggatctctgtgagttcaaggccacccagggctacatgagaatgaatcagtctaaaagagaaacagagctcacacctttaattcccagcactagagagtatataaggagctcattgcagtctcagagaacaatctaggattctgaggcttggtggagagcagtgcagtctggaaatgcaatcagaggttcagtggatcacccccttcagtctgagcattggaagagatgagaactctctagtgactggctgctttgcttctctgatcttcagcttgaaccccaatatctgtctctgggcttttattattcctgctacaccaggctccatcacacagcttctccaaagatactttcccaggcttagtcagcaaactttctttttttaattttttttttttttttttgcttctaggcaaatttttttaatttttaaattcgaaacaaacttcttttcaatggcaatcccagttccctcttccttccttcctcccctgctcctcactggccctctatcccatccctttctgctccccagggaggggaggccttccatgggggatcttcaaagactcatgtcatttggagcagggtctagaccattccagtgtgtacaggctgggagagtaaccctctatgtggagtgggctctcaaagtccatttctgtactagagacaaatactggtccaccaccagtggccccatagattaaccagacctccaaactagcatcctcattcagggggtctagaagagtccaatgctggttgcccagctatcagtctggggtccatgagctcccccttgttcaggtcagctgtttctgtgggtttctccagcctggtcttgacccctttgctcatcactcctccatctctgcaactggattccagagttcagctcagtgtttagctgtgggtgtctgcttctgcttccatcagccactggatgaaggctctaggatggcatataagctagccatcaatctcattatgggagaagagcttttaaggtagcctctttactattgcttagattgttagttggggtcaatcttgtagatctttggacatttccctagtgccatacttctttttaaacctataatgcaccctctactatggtatctatttcttgctctcctctaatcttctcctgactcaatctttctgttctctccaatccgcctctcccctattcttctcccctactctttcttctaactccctctcccctccccccatgctccctattagatcaggagatcttgcctctttccccttctctgggggaccatgtatgtcccttttaggatcctccttgtttcctagcttctctgacggtgtggatttaggctgctactcctttgttctccatctaaaatccatatatgcgtgagtacataccagttttgtctttttgtgactgggttaccttgatcagaatggtttcttctagttccatccatttgcctgcaaatttcacgattccattgttttggggttttttttccctcgctaagtaatactccattgtgtaaatgtaccacattttctccatccattcttcacttgaggagcatctaggttgcttccaggttctggctattacaaataatgctgctatgaacatagttgaacatatgtccttgctgtatgaatgtgcatcttttgggtatatgtctaagggtggaattgctggatcttgtggtagactcattcccattttcctgaggaactgccatactgatttccaaagtggctgtatgggttggcactcccaccagcagtggaggaatgatcccctttctccacctcctctccagcattggtgtttttgattttagccattcagtcagcaaactttctaagcctgacaatgtttagcactggcagagattgagcattcttaagggaggttatggtttgaacataaattatctctacaggttcatgtgttgaagacatggttggtcatcagtcttcctatctctcatgcttcctgctcactaggaagtaaacagtatcacctcaaatcccaaccaacagcatctattggtattgtttagatatctatacccctcctgaggcttccctcccctcaaggtttctaatcccttcaaggcagttggcaccatttccagaaagtcaataaaagggataaaatcccatcctatatgatagctggttaaatctgttcccatgagacccacatggcctaggggttggttatttacatggccaagttcatacacttcttattatttccctcagtgatttacatcatttgtctttctgagaggctgtcaagttattttatggagctagacaaattacaggaaacatcatctttaaaaaggaaattcacaagaatagcaagaaaaaaatgaagaaaatgtgtttaattttgagaaagactgatcctatcagaaattaaagcatagtatagaacctctataatgaaaatacctttggagtaatacctgcacagacacgcaggccagtggcatagaagaaagaagtctcaaatggaaactgagcatgttactacggtgttatttcagtaaacggcaataaaaatgggctggctggtagaatgttataaaataatccaatagccttttcaaagggtataaaatcagatgtacagcttacactatttgcaagaatgaagtcatataaggaaatcaaaatattaaaaggaaagctgcagctcaagtggtggagcccttccctcaatgtgcatgagaccctgggttccattcccagcactgcaataaaacaaacaaacaaaaaaagagtgaaatcacagaagcactagaagaaaacaaaagtgaaattccatttaatcatggatataaatagtcttctaactgtgagtcaaaatcctaagtaataaagaattgacacattttaaatgtggatttttttaatttttcaggataaaaaatttttaataagttgaaatacaatcactgtgcccaaggagatgaacccatgaacaaaatgcctgctgagaaagactggggggcctgagttcatctccccagcccctacataaaaaggtagatgaggcggcatgcttctgtaattctgaggctgggtccccagagcttgatgaccagccagtctagtggaatcaggaagtttcagattcagtgtgggaccctgtctctaaaaacaaagcaaatgggcaggggcttatgaagccacaccactcctggagagctgtgaacagttgatggctgctgagggaaggacagacattttcctcattccagtagccatgtgtaagctgaccatggaccagtaagtaaatcctcaacaggtttctgtaagtgatctttattaaacatactgttccctaaaaatagaaaaaaaaacaaaacatggagatagaaggaggacttgttggtaaaaggaagaggatcagtaggagaggaatatgaaaataaggaggggatgactataacccaaatctagcatataaatgtataaaatgtcagagtgaaacacatcactaaatgtataattaatatatgctagagaaaagtttgaaaaaataaggcagagagcaagaaaagaaaacatctgacataggcctctgacctacagatggtctcacacacacacacagacacagacacagacacatacacacacacacacacacacacacacacacacacacacacacacacacacacacctcacatacacatacaataaataattgccaaaatgtttaaagaaaatatcccacagaaaagatctaataaagaattacctttaaaagctaaagggcaaatctggttgaaatgggtattagcaaggtttggctgcatcaggttttttcatcctttttattttcaatgtttcatatatatatatgcccaaaacttgtcctgtgctttcttctctccttggctttgtccctttccatagcttctgcctataacgctctttgaactggccaactaacaaagttccaaccatcccctcatctccatgtgctcagtcagggacattttattgagagtcttttatatgccagtaggaattctcagcatctacatggtggtttacaaccatctgtaacagccaggggatccagtgtccctctcctggcctctgttagtcattgtacacacatggaaaacaaacatacataaaggcaaaacactcataaaaaataaatctttgataataaatatgggagttaagtgtagacttcattttacccactggttccaacttttctcatggcagctcaatgatttcaaatatctaagcactccaatgccaatcaatcatttctctgtgtgttcttctgggatcgtttatctctttgctataaaattgatgtcatcccgtcctctatttcagcttagtacatcaagccctgagtgtccaggtcattcttttgtctcccagagcacctggcacaacatcatctatccattcaggcatcatgaaacccttgacaaatggaactgtatttaagtgattcaagcaggaagtaaatgtgggtgtggaagatctcaacagctaatgatccagcatcagccaggaaagaagtagagaggactttggatcactggcccaactgtacagggcacagtcattctctagagaagtaagttttccacagcagagagctggaagcaggagcaagagagacttacttggcaacaggcacagtgaggtgagtgtacattatcaaatattcgtatggctcactgagggatggagataaggggtttgtgtcaaaagagacgtggggaatgtgagtagatggaagacactggaaggttgtattgtattggaagggtttttgtgtctgctccaaaactagaatggaagaaagaaagaaaagtttaaaggcatgcaaactcagtgggtaagggttattgtggccaagactaatgacctgagcttgagatctaggacccacaaggtggcaggagagaatcaactcccaccagttacatgtgcttggggggtcagagaacaactctggggtgtcagttctctctgtccaccatttgagtcccagggaccaaactcaggtcatcaggcagcaagtgcctttatctgctaagtcatcttagcaggtcagcccttgactttttcaaaggtgctggagattcaaactcatatccccatgtttgtgcagtaagtagctactggttgagctatccccccagcctcttgaagtctttttaaaaactgtaaacacaagtatataaatgataagtaattcgattgcacttatttttttttatcagcatgagttcaatgccttcaccaggccccatggccaattctgtatatgtggtggcaccccacaatggttaccctgtggtctcaggaaccgtgcctcaagtgcctctgtatccaaacaaccagcctcaaatccatgtaattcctgggaatctacctgtttcggtgccaacccagaaagtcttgaaaaatggcaaagtcctaggggtaagtagaagttccctttgtgagccctaggccatgctacagagagaggaaagcagaggtttgagataggtgaatagaaattctaaataaggagcagcagaacaaggtaagtcagttaggaaagtgcttagtgaagtgctgccaagctgagtgccatccccataaaccaccttacataaaatggctgtgggaaagcacactggcatcccagaaccaggaaggcaaagacaggtagatagatccctgaagctctctgaccagccaggccagcttacatggtgagttccaggctagtgagagaccctgtctcaaagaaaaaaaatgtgaatggaccctggggaatgatacctaaggtagatgtcagtctcatcgaaaatgtcatcacacatgcacacacaccaacacaaaagatgcacagtgcccaaggaccatgcccacactcatgtgtgaacacatacacacacgtatataaacacacatgtgtgcacacacatatacatacatgcatacatacttacataggtacttaaatgcaaacaaaaagaaagaaaagaaacttcaataatgcaggtgaggttggcttaaccaaacccaggtctgttggaaatctctttatcactaggagcctcatcagacaaccttgtggtttctgatttgggcatttagaaacaaagaataaaaaaaaatagtcaaaaagcattgatcttgaatgtagacccttttgcctctatgcatttgcttcctatagcttaggaagtaagaaaatccaacaaggacaaagcttcccaaaggtggaatgaaatccacggttattaaatcaagtctttgcccaaagtagaaagaaggcaagcaggttagaccagcaatgatgcctaaaatgctggcctacatagtacaagagagcccatttcattgcatagtccatggtgacaagcatccattctgatccagagcccatgtcccaatatctcagctcatgctctaatcttgcttggggaagtctaaaaagagcaacttgcatttcaaaaaacaagcatctagtgttctgtttcttagactatagcctccaaatatgtcaatatgcacaaaaatgtggtacctataagtttatttgttgaagtatggcttgtagagacaggatgaaagcaactgaactgtctgttctagccttgttctgttgctgtggcaaaatactctgataaaaagcaacagatgggaggaagaagtttgtttggcttacagttccaggttaccagggaaaaaaaatgaaggcaaaacaaatacataaaaggatgttgaatatgaggctgtgcataatataaaaaaactaaaggtcatcttacctatccaacattggtgttacaactgccctccagaaactctaggaagtgctcagagaatattttttaaaatatttgatgagtacagaagtggttcagatagcaaatggcacttgccatgctagtgtagggacctgaattcagatccaaagtaacctgcaaaagctaggtacaaaagcgtgagcccataatacgaacactggggaggtagagacaagaggctccctggagattgctggccagccatgtttgccagttgataagctccagatttgatgagagattctgtctcagaaaaataagatgaaaaatgactgataaagacccctgatgtcaatctctagcttccactcacacacattcacacacccatgcacatatgcacacacatgcatgcacatacacatataaacatgtacaaacacacacacatacatacaaagaaaatttaataatgggaggatgtactcacaatgaagcaataaattaataaagtgcagagacactgtttctgttaccaagaaaacatgtttgaaaaataacaataggaggttataatgaaatgtaaattcttgctttctccagggagggtttaattataaatagcgttgattttattaatatgtttctcacattatcttttagaccagggaaaacaaatgagtattaaaatataaaggaagcagaaggaaaggcaggatcaggactcagaggcaaagacttcaactgtggctctcctgacaggccatccagatcctgattggcttggtgcacattggcctgggctccatcatgttagccaacctctccaagtactatgtacctatctccctctatggaggcttccccttctggggagccatctgggtgagtagctctagtctgatgctcggggaagcctagtcaagctgtttaggaatatggggcttcttgatcaaatatcttggattgcataggggtttggatggactgtaacaaagtgtcatagtctgggtagctctaaaccatagaagtatgttatctccctgttctgaaggccagaaatccaagaccagaatgtcagctggcaatcaacattgaagtctctcctaaccttacagctagccatcttccactggtgtcttccctctgtacctgtcttgtgtcccaacctggttgttgttgatgttgttgttgctgctgctgctgctggtggtggtggtggcagttttgttgttgttattcttggtggtggtggtggtgaggggtgggggtgatagtgttggtggtggtgtgttaaattagtatacaaagtaatgggtttattatggcactttcactcatattttgttccaacttctctcctccctgccactcctcccttgctcccctgctcccctcccacttgaccccttccttcccctaatacctccctgttttctttcatttctgttgctgtgataaactaccctgacaaaaaccacatgggggaaagggatttgttttagcttatgattccaggctataggttacagtcctttattgaaaagaagtcaaggtgttgggaacttgaaacagctagtcacatcatagctatagtccaaaccaaagagaagtgaatgcacaaaggctcactctacatacttgcttgggctcaactcaagttctcctacacagtcaggaacccctgcctaagaatggtgctgcccacagtgactttagtctcaccaaatcaattgacttaattaagataatacttgccaggaatgaccgtaggccaaacaaatgtagacaatccctcaatgagactgtcttcctagatgaccaggttgacaattcatcacacttctcttctgctttcatagtcaatgtgttctgccactattatctgccatcaaccttatgatctttttgtcccctttcatgagtaacaacacacacacacacacacacacacacacacacacacacacacacacacaaacacacacacacacacaatctgcctatgagaggaatcatgtggtattcatcttttagattctggcttatttcacttaacatgacaatttctagtccacccatgtttattgctaacctgctcttataagaatattaatggcagggcaaaataaaacacctttaatcccaacactctgtaggcagaagcaggaggatctctgtgagttcaaggccagtctggtctacatagtgagctccaggccagccagggagacagagtaaaaccctatctatggtcatattctgaggttctggagctaggtctttgaaaatatgaaactgagggtcacaaatcagtgatagccctacaaagctgtacccaccaaagaccaagatcatcaacccagaaaaggtagcatttaactcacaaagaaaatgataatggggctaggctttcaggcattgttcaacagaagactgagctcaagaaacacttttttggttttgttttgtttttgttttgtttttgctcaatagtcagtagagtttgacccagcagtggagatgtctaactcactgtccacagatgggctcagaggccattttggtggagtatgatagctgtgcattcttttttctgaaaaggtccatgtgatctgtgactccacaaaagttctatggtccttcctccatgccagttcattgcctttggactctctcattcttttcctggtacctccccaacacacacacaccctgctctgcccctctccaactgccttttgtttctccctcacctacctgtgtctcaatacgagttttcccataaatgatcttagaagtcaaccaatgccaacatttcctatacaataataaagtaagttggcactctgccaaccctactgcttcacaagcttacagagccataaggatgtacctttcagagatacatcttgttctgacacacgctcataactcctcttgttcatgactcatcttcccaggctgagtgttccttgaactctgaactggcccagacttggggctgaacccccttcccctccaccaacccactgcagatgcctgtgcttgtagatagacctgtgctgaaacacctcataatgtcacggctactcactaactttctgtgtcatgttagattcctctgagtgtttgtgacatcccaaatgccctggtggcccttcaggtcggaattttcttccccttgtcttcgggtgttttgttgttgccattgtttgctgttgtttcttgtcactttcttaattccaggtctgtctttctatctcccatctattgctaacgccctcctccagagcaaaggaacatctccttagtgcctccagagaaccaacaagaacatgaaagtccaactttcttcccttactttctaacacatgtctctaaggggaaaggtgtgaaattgagacttgtttctacaatgacagaaaaaaaaaatcaggacattttccttggaagggaagcagctcaaatacatttcattgtaggtaactatgcatctgccccaaatggtaatacaggacgaaggctaagagattgagtctgaagtcaagctactgggtttgatctcaagctttgccacttgcttgatgatcttgggtaaattgtttaaaatccataagcctcattctgcccatgttttctttttttaatttaaattatttaattactactcatatttacatatccatcctcccatgttccctaccaatcccacccacccatcccccaactcctccccaaggatagtgaggtcctccaccaaggaccttcaaagtctgtcatatcgtttgggggagggcttaggcctccttgctgtatctgggctgcaatagtatccatccatagggaatgggctcccaaagtccgtttgtgctctaggctccactgttagaggtcccatagattgtcttgacctcctagctggcgcccacattcagagggcttggttcggtccaatgctgtttcggcagctttatttactttattcattttaaaatttttataaatatgctcatacatcacattcacccctgttaccctcttttatccctcttcccactccttctgatacccccttttccacaactaatccacctcctactttcatggtgttctttttcttttgacccatgagtttaattagggttgctgtctgagcatgagtgagggggtatttaccggagcatggcaacttactaggggctacactgctaaagaaaatgatgttaggtgaactagtactcaggtttaagagaaacactgcacatgggtggacaaaggaagatatggacaagattactactgggtaggggatgatgaaaatgttctggacttacattatacaactataaattactaaaaatactgggactacatgctttcgattaatgaatggaaaggcatgtgaattttctctccgaagcaccatttcttaaagcacctcaagtagaagccagtagatagccgattttatgaaaccttagttactgccctcttagaccaccactgttatcacaccaggcaaacaatggcaggtgatcgctcaggcacattgcctgcagagcacaggtatgggcaagaaattctccccttctctggtgctcattatctaagcaattgaacaattgaacagaacccattcagacatgcagcagagacgactaatgctgacctcctatctgaacacccagaggagtcagcaccctctccctcctaacctcctgagtgttgtagcctggcatgtctcagcaccaagccatggaagtcatgaggttcggcctgagtgggggagccagagtgagaagggaagaaaaggaaggatgcagaggtcatgaggaagcagaaattttgagtcaggtgtatattagaagaaaggacatatgacagataggattttagttgggggggtggtagaggaggaagggagggagaagggaactgggatcatcatgtaattcaatcttgtttgtaattcaaatatataaaaaaataaataaataagccagaaaaaaaataaaacctgttctggtgaattctaaaaccatgatattccatcactgtctcttagcaattcggcacacctattttctaccattgtagagctggatccccataagtaactctgtatgtgagagactgtctgcttcccaaatcagattcctaaggaagggtgtgctgatgcctaacacttgataagctcccaatcttgtgcacaagtttatcatttcaggatctctctcagtggcggcagaaaatcagcccaattcaccttgcctggtaagtcacattctgaggctttctgtcccacctgggaacctatagtgtcacagtgaggatgaagactgacaagcaatccttcccttactcttgcaccactaagaccagatctagggcaccggcattcacatgcatgttaacccttgcatacagccgcacacaccacacacacacacacacacacacacacacacacacacacacacagctcagagagggaaggacaacactgctaccactattagggtatcaggatgggaagagagacagagggagacaggactagcttgcataggagaccttcacaggaggagacacaaagctcccaggtactcggaacacactacacagagtatgcccatagcacatagagcaggcttccagccattcctgcaggagccagtaaaggtcccagcacctgcatcacaaagaaacccagaaactaaactcatggaaagagttttttgtgcttccctagcaatggaccagtgtaatagctctgcttccttgatgagcaggttgcctggagtaactgtctcctagtgatcaagatcctacaatcagatgagatctattggaaaaaatccagaaatagaagtttaacatatctagacatacctttctgtacatggtccagatgcataaagtgcttcataccattgaactatgccttttataaattactatgatgggaaagattatatgtggtctaacttaacagtacaaatgggggaggggtgtttgctgaatctgcacatctcagctgtaatcaacttcctctcccatcttgaccctgtgtgtcttctccagatgaatggtagtgtgggcttgaacatcttcagcgccatctgttctgcagcgggcatcatactctttatcacagaaatgagtgtttcaggaatatatggttaccccaatgactaccattactacaccaactgggtgagtgctcactgttagatccccagaaaactcaggtatctggggtcccaggccatgacagcggtcaccccaatcaccaggcagatttgagagcttgctgcaaactgcatgaggctttattgtaatttaatgagctaaccccatgttagctcgggtcttttgtccactcaccatggcggttggctacaaaagacagtttgaaccggctgctgagagatcttgtagggcagagtaaggggaggtctaggggtatgcacaggttcacgattggtgtgcctccaggcttggcgggcttgccctgtgttgattggccaactggttgttatggcccataggccctcccagggttgttgctatgctctgtgcgtcattgctgtgcgcttgtctgtaaagtacacccagggtcgtaaagcatagcgccaccagctaacttctgattggttccttgtcacgaggcaggcacctaacctctagtgactaagacaaggtcatagcgagcatgtgttactgtcatggctgccgaaatggggagctggtcccttcactcacaaccaaagatctccgccttcacttagctatgttcatactatgttagaaaggacctagcaagcgagccttcccattgagcactggaagaaaaggaagtgcttttagtgtcaggatagggtttaaagtcctcagctgtagcctttcatcagcttttaccatctttgtaaaacagtacctgccttgtagcgctggaaaaattttacagggtgatgcataaaagaccagctgccaacacagtctcagccctccacagtctcagccttcccacctgctatgtagaccagggttcaacaaacattttttcctcctttgaaaacttttttgtttagtttttaagctactatccaaagagctaagtttcatcattacatagccctgtcttcctcctatgtccttgatttttttccccttcccttcctatccccctctatcctccaccccctgttggttcactttcttcccgagttaatcccaactctgctttctattttttttaaagatttatttattttactctatgtgtgcacatgttttgcctacatgtatgtctgtgcaccacgtgtatgcctgtgcccatggagatcaaaagatagccttggagccccttgaactgaaggtatagatagttatgagccaccatgtgggacctgaacctaggccaaatgggcttttaggctttgcagagcatacagttcctgtcacaatacagcagacctttagcatccacagaaaatagtacatgaacaagcatggccagacaacagcaggatcaactctgacaactgtcactggcccgcctgcactagcaaccagccccacctaatagaaatagaatatgggctgcatatgtgattttaaattctttgccaattaaaaattgcaactaattttattaattttttaattagcatacactgttaaaagaagaaagtgatagctgggggaaggagagaagtctggttctatagggacaggcactacagttgggactcagggccaggtcccagaggatgaaggagtcgaggaggagtggttattgcacaggcacacagacagacagcagcacggcagagactttggcgatagttcaggtccacatatcagaatagagagccagtcttataggtcgaggaagggaggaggctgtagcctacaacacagccctgcaataaaaggagcagggagggttttgcatcgccaaggaagagatggattcttgctaatgtgggacttggatgtggacaaaatgaaggtcagggccacatttagttaaggtaccataagcatcggggatattttcctttttttaagatttatttatttatttatttatatacagtattctgcctgaattatgtctgcagcccagaagagggcaccagatctcattatagatggttgtaaaccaccatgtggttgctgggagttgaactctggaccttaggaagagcaatcaatgctcttaacctctgaggcatctttccagccctgttagggatatatttgttttgagtagtgaccctttgagatccaggttgtgtttttacactaacaacacatcttagtttggcgcttagcactaatctggtactcagcagccacagaaggttgtgatactgagctcaatgggcagctttgggcatgacttctcaacctgccaatggaccacaccctcacccagcggatcaagccctccactcctccatcccttctctcttctacactatctatcccctccattttcttagagattttcatgcttttgttttgttttttggttttgtttttgttttttcatctcaaaaggcatctccatccttcagttgctacagacaaaaccatgaaggaaccactgatccctctctctcacctcacagctggtttcataaggagtccagttggctcttctttgggaatgaacccacaatccagccatctttccactttgtttcccattgtaggtcatagcccctgcatctgtcacctcagtctctgaaacagcctccccctgcccctgtccctgcccctgccctgatccatcaagagagtctagtcattcatggttccgaagggggggctgcctgaaagagtcatgggcgagagaagggaaggagaccaagtgcgcaaaagaaaaaggactagagtccgtctatgcaatgtcaaggtctcgatttattggggctcagagtgggcttatatagccctgcaccaaggaaattgggtaagcgggggaataacaggaaggaacatctggtgtatgctggggccggagcattcttcttatcagccggaacatcttgtggtcttccccggaaaagcaaacaggaaagccccaggccctttcttggaacagaagcagttagcagttccatttggccaaattgtgtctaattacaggttacaggaggctcacagagctggctttgagccgcaaactttaaaggtcataaaaagacttacaaaggtgggctttaaaccgcatagttcggggcccacggccccttacatctcccccttattttttccttaacaaaggagggaggtgagactaggccacaggtagcattcttagggggtctttgttcatgaccgtctctgtcttaggttagtttgaccttgccacctcattgactttacccgtcttcaggtgataaaaacccaccatccaggggtcccatgtcttagattagtctaagagggaaggaagttgcccatcgtggaggcggccatttgtacccggggctaccagtgttgcatgcctagggatggcaagtatgactctaaagcttgtgactagacctttaacagtttagaaaaattaagcctctcttgatggcccaaggggttgcctggttcgctctgctcgccgcgctgctcgtcacctgggttctggatccggtgatactgtatggagacaaaaatctttagaaagggatgaatctatttgaccttttataaagtgagttattctttggaaggcccacgggccaaaagaaatcagcagcaataatcctataagaggtcccaggagggaaagccagggggaggttgaaaaccaatttttataccaggactcttgttgctctttttgtttctttctatcctccagatttttctttattttttctatactatcttgtactaacccagttttatctttataaaaacagcattcctctttaagagctgcatagaggccgccttctttaagaaagatcaggtcaagacctctcctattttgcaacaccacttcagatagagagaccaataactcttttaagttttgtaatcctgtttgtaattcctttatatctttgtccactgccatagacagttgggcatattgctgtttggaagttatcagggaagctaatcttgtcccggttccagctgcccctaagcccagcacgacagctaaggtgacagctgaaatgggctctctcttgtgacggggcctttcctcccagctagggagcagctcctctggggcatgtactgttaggcggggcaaaagccgtaccagaacgcaataatctttattctctagaaactgagaggtggaaataaaggtggtgagtcccagagagcaagcaaaataagttccatcaggtgcagctacatatgtagatgactggctaataataattgtttggttgtacattggctataagggttctgggaaacgaagttccagtcctctaatacagaggcctttgcctgagacctggcttaaagtcaagcctgcatgattcatggaatgccatcttagtgagaaagtctcattagtgaagacaagattttcgaaagtcagcatgccctcatagaagggcggccgaggggaaaagcatatccagcattcctgatagcgagaattattaatggactgtaaggctaaagcagaagcatttaccgtggattttaaggcctgagaattctagtcctttaggactgtggggtttttgtttgtttgttttgtttttttttgttttttttttttttttagagtcatcaggcagctcagaatctaatgcctctaggcgatggtagtggatcaaaaccggtttttcaaggatggcggcatcaatctaagacttaatgaacctggttagtttttgaaaaggtaaaggtgacaatttaagtaatcaatccagtagaacaggcaaggtaggaattagtaagtgcctgcaattccctgataaaggggaagggtcgaagaaatagcagatccaacagtcctccataagggagtggctggcttgatgaggggcctgaacagtagggttaattaaggcaggggttccctagtctggagaggcccctaaggctaaagcacataagtcaactatcaggggggaataggagaggatggtcgcaatagttgtgaagcattggcagcatcactggctcggttgaggatcatccaggtgtagttgtagatctgataagggcttccagcagcaacggcaatggaaggtgggaacacacaagtagccaaaagacagcatcttttatctagaattaagcagaattagaaggcttcccaggggcttcccctggttggattatatagttttaaaaggcattcaggcaaccatctagcactatgggcctgagtatcaaaaatccatgcatgtccttttccccaaatgaggaccggatctggtccgggccatttgtaaattaggggatctttccataaggcttgagcataattttgagccgttgatggatgccagaggcgatccgaggctgatttttctatagcatcatacgtgaggaaatttagcacaaacaatgcatggtagaactcctccttcttaggcaacctggtggccacccgctctctggaggtcaccatattgatgccgaatttagtgcggacatccaatcggcataacgcactacaccccagaactcctggactcaagtgatctcctgtctcagcctcccgagtgctgggattacaggcatgcgcgaccgcacctggcccgtgcatcccacaggctcaggagccaccgctgcccgagctgtgggcttgcctcatgtctacagaagtgtggagctacagaagcatggaggcaggcgcttcactcccccaagtcagcggcatgccgagtccccaaaggcccaaaggcccagccatgccggccactatgggctcggcaggcaggtccacgcgcactgggcgggactaggccacatgggctgttccggcagcaccagtctcgggaattaagcacaaaattgctggaaagctttgctagtatatctagacccattatctgtttttataacttttggcactcccatgcaagcaaaacatcttaaacagtgacttataacatgcctggtggcttctcctgtttgtggagtggcacatttttagcttgccaaactctgtaatgtgagtcacatccattcgccataaatggttggggagcaggccttgaggattcatccttaaattagccatagccatattgtggacatattccacattgtttgatgatttgatcagaagtctctctggttaggccaaatttcttacttagatttgctattatgatgaagaaaagttacaagcctgtcgagctttttctatttaaggcaaatcaactgattttattaatcagataattcattccatttggccagtaatcagggaaagatctatttaataggtttcccgtgtgacccataaacatgataattctcttaggtgaataacattttgaatttattcaaataatattttgacttggctattaccagatcctgtgcatgggactgtttctgttaccttataagccttaaatacatagtgactgtcagtatacaaattaaatgaattatttaccaggatttaaaagaccattgtaacagcttgcagtttgattatttgagctgaagccagagcagcctgctctatctatttctttctattaataacctatgtaagtgactctcccaatagaaccattggtaaaaattaacatagcatatttttataggactgctttttacaattttggaaatacaaagggatgcattagtgcaaattgtaacagtccatgaactagaaattgattatcaattcttccagaaaattgagcaaagacaatcacccataaatcattgttctgaaaccatcaattaaactgttgcttagagtaggagacatgtatcatacttggttttctcccaaaatacttcctaaaatctatatggcatttctgtaccatgtaggctatcattagatgtcccaaaaagatacttaaccaatgaatattttattaatttctttacaatacaacatacgtccttaacaattttccagatttaaagtttctgagtagccttttttaatctaaccttcgaagctgacaagctgataagacctcatttgcatgttagctgacctgccaagctgtgaatctaacaagttggctctttcctgaggcttcttacaaaccctttttaaaatcatgtttcaactttaattttctagatttcctttttttaaccataaaagacctgtatcctctcatctgccaaattttatagaatcatccatggatttctcatgtctctaagctaatgctataggcttttgctaactttttaattgactgtctcctagggctcaaatcataatttctcctgttaagacattgactgactgactggatgctctttttgaccatattaaagtgattttgatattttttaaacaatatctgaggcaatgtaaatatctctaatcatatccaaggcaatttaggcatttccattcatccacactcataaattcacaatcacatcacacatccaggtgtgaccacaccgttcattcataacttgcatatgtcttacatttctccttttgcctaggttatgatcagcttgtagaaaagaaaaatccctagttgaaatttctaacatagtagcttatagtcaatcattgaaatatgagcatccaaaatttgaacaattttaagcttaaatatgttgccttttcttttctataagtctcaaaaacagtctggctgcttcaatagcatttatatatattaattagccatcaaccatggtgccatctcccaaggctgtaagttgcagcccccaagcttgaccgcctctaagaaatgcatttctcactgtgggcggcttgcaagtcccccactgtgggcaaagtaactctcccaaccttttcccaggtctggggagctatgtctggtcccgttaaaatcaaccatagacaagctttatcaataaaacagaaaaaatgaactaaatctttctttttgactcttatttctttttatcttctcctttttaactcttactcctttttatctttctttttaactcttactcctttctccctgaattgtcttgagtttccttataaattgcaactccttactaatgaaagtactcatgacatttggacggcaatgattggtaccttacctccacctggagagggctcgagtctagccgactgcaggatcctctttgtcccgggctgtctttccgccatccgacagctttaaccgtacttcaagtccctgttcaggcgccacttgacccatccctcgagtctagtcattcatggttccgaaggggggctgcctgaaagagtcatgggcgagagaagggaaggagaccaagtgcgcaaaagaaaaaggactagagtccgtctatgcaatgtcaaggtctcgatttattggggctcagagtgggcttatatagccctgcaccaaggaaattgggtaagcgggggaataacaggaaggaacatctggtgtatgctggggccggagcattcttcttatcagccggaacatcttgtggtcttccccggaaaagcaaacaggaaaaccccaggccctttcttggaacagaagcagttagcagttccatttggccaaattgtgtctaattacaggttacaggaggctcacagagctggctttgagccgcaaactttaaaggtcataaaaagacttacaaaggtgggctttaaactgaatagtttggggcccacggccccttacactgcccctgacccccaccccctgtcctcctcaaagctctcttcaacatggcatccagcctgatccctttgacatacaaggtcatgtgtattcttcactcaacctattttattaagaaatcacctctgatgcaaaattttttgacatttccttaactaatgactctccttcccataaaggctagtagtaacagtagatgataaatagccactttccaccaacactttaccctcacaaagacctgggacacatttgtccccataaggctaagggagagagactttgccaaggacatgcagatggtccgtttcagagtcttgtcaaagtcctagcctagcactgatgcccttatatttcttctgattctagaatacaggcatggctatttctggtgtgctgcttatcttctgcatcttggagctctgcattgcaagtgtgtcttcccactttggctgccaagtgacctgctgtcagaacaacaatgtgagtccttgtgggtggaaatataacaactttctgttgctatcagtaggctgggtaattttaaaataaagaggtttacttgcctctcaagtctagtggctggagtatctaaacagcattgctctggagaacttctgagcagaggctttctctgcctgggttataacagcaaaaaggaaaaagaatagtgacctaactgagaaatgttcaagcacgtggggtagccttgctttgttacaacatcctcttgaaacctagccttctccctgagtcaggaataaacacattcatgaaagtggtacccacagcctgatcatgatccctcagaactcacctattacaaatcccaccagctcagccacactatgctgaagtgtaggcttccagcaaagaccctccagaggattcctctagcattagtgaagtatgcacctgctgtgtgcctttgtttttcaggtgaatgtggccattccaaatgtctatgcaacaaacacagtggtcttcccagaaccatcgaacccaatgccaagttattccaatgtagttcaaaactccagataagtgaagctgaagattctagaagaatctttcactgagaccaagtgatgttctcccctgcttaggctcctgtatgctaggtccttcctttcctgacaaactgggggaaatgtctctcttactgcttatactgtggatttgtgctccaattcatcctggcaagccctgctggctttctactagaataaggtgggtgattgaaatggattgcaacaaagatgtcctctcaagaccaatgcatttgtatggtggtaggccttggtgtatacacattcatgtactccctgcctaagggagttttcaaatagagaaatagccatctcatcacccaagtgtccctctgtcagtcattcaatcatttaataaatatgtattgagcatcagaaatacccaagactattcatggcagacacgaacatgatatagctcttgacctcatggatacacaaactgctgacctcagaagtatgcagggggagaaaacacagagatggatatgatttattctgtcagtgatgcaacaaggagagaggaagcatagaattgggagacctttagagaggttcaacccctaaactgctgatatctttgtacactggcaccattgagttcggtaagttgagttttaatatatgacttttgggggtacacaaatattcagcccataagacagattatgtaaagcctgctgataagatttcagatatcatgtgtaagaagccaacttgtaagttgggggtttcagtttccaaccatgagggctgggatcagcaatataagagatgaactgtcagaattgcaagtggaatggaaggtaccacaacatttgataggtagtaaccaggggtgatgctaaacacccagagactacaggacacccccagagcaaagaaggctctggcccaaaatggcaacagtgctaaggttgaaaaataaaccttattttttgagaaaacaacaataattatctcaaagggccatgaaaaacaacttcttccaaacacacaactatccagagccaggcaccaaaaacaaaccattaaaacagaacagatgggagaatctacttcttcagttgggccagacatgaaagatatgcacaaatctgatgaggttcaggatgcaccaccccaaaaatgtgccatcaggcacctgagaaagcctgtaattgagaaggccactcccaccttcctttgtctgtccccctgaatatggaaaagctcactcaggggccctgtccactcctagaggaaaggaaccctgctgtctgaagacacagagaagacgttgggcacataggtcatgtgaggctcacctgttcgtcacctttgatcacctttttttaattgttttcagatgttatttatttttatttttgtgtatggggtgttttgccttcatttatgtgtgtgcagcacatgcatacagtacctgtggattccacaagagggcattagatcccctggaactggagccaccacatggcttctgggaattgatcctgagttctctggaagagcagccagtgctcttatccactgagccatttcaccagctcccagatcatattttttaatatagttcatgactatccacatcttcagcaaaccaaccacaaatacttccatgatcttgtctttgcctccctagaaaggtcaacagaaaatcatagtaagtagatacatatgcttttctcttgttatgtgttttatttcagaggcttcatccatgagcctagtgatgggagatgcaaagatatttcttctcctaccaactgataaaatttttattttggaaaatagctatttttcattaaagatgtttatctgtgctgacatgagatatagttttaattcaacaactaacaaacacatcttagatgtctctgttttatttactaagagtaaatatcaacagatggaatcctcataagctctttcagagtctttcattgatttcctacaatgcaaagacgtcctgagttccaagagttaaaatacactcatctgttgtgttattcctatctcaaagccctatgatggctctagtacccaaagaatgagcctccactttggagcctcacaaccctgtctaaacactcttcgctcctcctcacagtatgcaatcttggtcctctagtcagactcagcagcctctgggtaaaacccaccacacttggtcatttgctcactcattacacagccaccaaatacctgcccatgcagatggcaaccatgtcccactcctaagtgcttgaaggttggtgagatgataacatgtatggtaactgtggttcaaggacacaggacatgccaaaggcactcaggacacagtctgtggagggaacaaaattatgagaaacgcatcctcctctgatcccagtgactggccagagtgtggagagtggaagtgaaagctaactgttctctctaatcacatgggaagaatgtgggaaccaactctgcagagacaccactgagaccggaagtgagaaaacaagggaaatcaggaaaaaaaaaaaaagccacaagcacacaaggagaccaggttactgagaaaagctgtccagttctctgtgacagaatcaggcaagggaccaagatctgtgttgagtgacagctctattgatctgccacctgtcagcttggttagctccacctgtcttagttttctttttcccctgttgcactgaagaggaattataaccaaataatcttatttttttaaagcataatttgggggctcacagttccagcaagttacagtctatgatcatcatagtggagagcatggcattaaacaggcagacatggtgctagagcagtagttaagggtctacattccaattcaaaagttggaggcagagaggagacgggggggggggggggggaagggaggaagagaaccaagaatgctgagcttttaaaaaccacaaagcccaaccccagtgacacatctccttcaacaaggacaaacctcttaatcctgcccaaatagttccaccaaccagggaccaagaattcaaatataggagttgtgggggacattctcattcaatccaccataccctatggacaattatgctttgctgggtaaaactttaggaaaatcaggaagaaaatctccaaagtcaaataaaaaatagagatgtgaatctctattttttttatttataaataaataaaaagcagaattacaatgtggaacacacttgcacagcctaggatagcgtaggatgttggcaatagattttgtggggacagagaagtctatcctagttctagttggagggggagatcactgaaatttcttttactttcctcaagtgggtgagctcaaagaaataagtacagacaaatacaatgcaaatctgcttttgtcatggtagctccagagccctgattagcctctaggaaaacaactgcacttaaagacagagcagagagtctcagtgatttctacaacaggaggctgtggcccaagggcttttcctttgttcccctgggaaacataatgacctaaaagctgagaaattctgcacaggaacattcaccactgcaggcaattaggagcctgaaagctcctggcagagtcaacagaccaacctccattgtcatttacaactttgagacaagagctacagacaatatcttccaccacagatgttcccctctctgccctataaaccccccccaacccttcacacctcagtgcacagcctccacacctgtgcagtctgatgtcctccattgttctaattaaaggactgtctgtccctgttttcttttagtcatgtcacctccatcaatcccaatctagcctgttagatggatatgccagcagggattgctttcctgtcacaaacactctatgagctttctgggtaaccaagtgacacaaacagggtagcttattaaatggattgtccctcggttctggaggctgggagtctgagctcaggttgtcaccaaggctgggtccttccgaggtctgtgagatgagtctcctctcggcttctcctagcctctggcttatggcagtatcaagtatgtttcagtgttactccatttctcacctgcctgtttaaatagtgtgccctccctacgctcacctctgcaagttctctaactgcaactcataatgaaaacacaggtgatgcacatctgagaataagcctgaagctacaccctagaaagcctggaagaatatccacagatacatgtactcatgttacttgaagaataaaccagtatttggtgtaaagcattgaaatgtgtctgtttatttccatagccaaatatgaagcaattgtctaagatggcattgaactgttttccaagcaagaaattccccatgtaggaaatagctacttgaggatgtgtttggggatttttcctgtttgcttatgggataagccaactaattgcacagactactctcagactggggattttttggtccatattagcttaacaaataattgtcccaacacagttcatagggaaaatgaaagtgatatcctcaaactttatatagaaacccaaggagaaaaccagcaggcatctggcagtcaaccagagttgcaagatgtctatggaaagtacctcttgatctataaggggaaatctatggtgggtgagctgacccatggagggactcaacccagtttactggtcttggggagaatgagtgtcaccttccattattaaaagcttgtacccagtttattaatatttctgagtctgtttttccaggaaaagagtacttgcagagtggatatctcctatctgagtccacagagcttgagtccaagcctgggatgtagggaagagaaggcactaagttggcatatgaaggacctgatcccttaagtgcacaggtgtgtgtgtgtatacatacacacacacacctgcacacacacacacgcacacacacacacacacacacacacacacacacacacacacacacacacacacactcaggaatgtctggagagaattgagcaaagaacttaaacataagttcctcctggtccctcctggttcttcctctttggggatcacttcactgactctttttctcaatccaaagaaaggccttaattccttgccctttcaaaatatctctgcctctgtccagcaggttttttttttaaatgatctaattttctctaaatgcacagagcaacagcagagttttgtatttgagccagaaaactatcccctctgctaaagatgagatgccctgtctggagttgaaatctctcccctctgggagatttttggtgcaggccctgttcttcccatgttctcttcacgttggccttgctcccccccgtgttgctcatggcacctctttcctctaaccatctcacttttctatctgttcttgtctgtagcctcatatcctactaactcttacccagagaagcctctctgtttcactctacactataactagagttgtcagagtccagactctaaccatcctgatttggctaccagtcctcaatagaccaaacaaataagtaatagtgaaagtagaaaaagtgtattcattgtgacctcattgagaagaatttcacctttggaaccctgggtaggggctggagcaggtctcttagccattataaggaagaacaatacacattcatcaaagggaaaatccaccaagaggacattacaactcttaacatctatgcactaaacacaaggatatccaagtttctaaaagaaatattactacagctccaatcacatattgttctcaaacagagatattgggggacttcaataacccattctctccaataaacaggtcatccagacaaaaactaaacagaaaaatgctttagctagctaacgttataaatcaaatggaccaggagaccccctgcttgacctgaggtcaagccagccacccaactctagcccccagctctggggaagacctcttgtgtgacaagaggccacaccagctaccagaattctaggtaggcttcccacccttggatctctcccactctctgaatgctccttaccctatccctaatctcccctccttgtcaccatgttccagcccccaacttgagtagagacctcctgcacaaccaaaggccacactggccagaagaccagaaaggaaacagaaaccaaggaacaaaacacccatacaacaaagacaaactcagaaatcagcatctagacctataatcacccaacccagatgcctagacacaaacatatgaacacaatcaacagcagccagggaaatatgttgtcaccataatccagttatcctgctattatttttaacaagccctgaaaaatcccaacccagctgaagcacaagaaaaagatagtaaaaccaacttctgaagatgatagaggtccttaagaggaaatgagtaaatcccttaaagaaatggagggaaagaaaagacaaacaaaaacttggagaaaatgaataaatcccttcaagaaagccaagaaaaaaacaacaaacagttgaagaaagcaaataaaactgctcaagacctgaaacagtaaatagaagcaataaagaaaacacaaattgaaggaactctggaaatgaaaaatatgtgtaagtgaacaggaactacagatgcaagcttcaccaacagaacacaagtgatggaacataaaagaatatactacaccttcttcttagcacctcacagaacttccttcaaaaattactcagtcacaaggcaaatctcaacagaaaccagaaaattaaaatagtctcctgcatcctttcagactaccatggattaaagctggatttcaacaacaacagaaatactacaaactcacagaaattgaataattctctatcactgtgtcaaggaaaaaataagaaagaaattaaagacctcctggaattcgatgaaaatgaatacacaacattcccaaacttatgggacacaatgaaagcagtgttaacaagaaagttcatagcactaagtgcctacattaaaaaattgaattagcctcatgttcctggagcggtggaattaacagagtaaaaacggccatcttactgaagtcaatctacagattcaacacaaccctgatcaaaattctaacacaattccttacagaccttgaaaaaacaatactcaacttcaaatttaaaaaaaaacaggatagctaaaacaatcctgtataataaaagaacttccagaagtatcatcatccctgatgctgtaccacagagctatagaaataaaacctgcatggtattggcataaaatcaggcagattcatcagtgaaattggattaagatgcagatggaaatccacacactgatcaacacccaaattttgataaagaagccagaaatgcacaaaggacaaaaagaaagcatctcaacaaatggtgctggtctaactggatgctggcatgtagaagaaggcagacagatccatatctagcaccctgcacaaaactcaagtccaagtggatcaaagacctcaacataaaaccagatctgcttaacctgatagaagagatcctagggaatagccttgtacacaactggcacaggagacaccaatagcacagacactaagatcaacaattaataaaaggggaactcgtgaaactgaaaatctctgtaaggcaaagtgctggagtccagctccagcagggttcttgtgccacaggaaggatgtgtgaagttggtgaaaattgaggagtctgaacaccagttgtcttttaaactgatggcctcgactagctcaggccatctttatttatacaggttctaatgcgttcaagtatgaacaatttcaaatcatttctctttaatcatttccaagaatcattaacattttagtttctcttctttcccactccctcaacgtcgttgacctttaccccatatcaatatatagtaagccaaatgtttatgtctagctaggcgtatcttattcatactgtgacctaaccagcagcaaacatgcggttacaaagtaagagatttgagcccagtgattaattctgaacaatatgagatcagctaaatttattgtaatactaaagtaccattttcaggtgtacaccagtttctgagtaatctgtatgtcaactttattatatggattgcagttttaatcctattctttataaattctcaaaataatgattaatacctaactctttaactattgagactgtttcgttgttcttcctgtgaattcctaaatgtacttctttaagaggaactgggaattttagattcctttattgatactttgatattgaaaaaatatctgggctgggccttggtggtgcacacctttaatcccggcactcgggaggcagaggcaggcggatctctgtgagttcgaggccagcctggtctccagagtgagtgccaggataggctccaaagctacacagagaaaccatgtctcgaaaaaaaaaagaagaagaagaagaaaagaaaaggaaaagaaaaaatatctgagtgttcatgtcctgtgccagagaaatgtctgacctttcatgtcctatctttttttccttctgtgttcctataaggttttaaatgtcatcttttttttttaagatttatttatttattatgtatacagtgttctgtctgcatgttttgcctacaggccagaagagggcaccagaactcattacaggtggttgtgtgcctaggaatggtatagctggatcttgaggtagattgattcctaattctctgggattattgatttccatacaagtttgtgctcctacaagcaatggaggagtgttccctttgctccatatcctcactggcatgagctgccacttgtgtttttgatggtgtaagatggaatctcaaagcagttttgatttgcatttctctgacagctaaggatgttgacctttaaaatatttctcagccatttgagattcctttattgagaattctatgtttgtatctttatcctatttttttaatggaattatttggtttgttgatgtttagtttcttgagttctttatgtagttcaggtattagtcctctgttgtgttgcatgcaaaataaaaggcacagagacagatattggggttctaacttcaagctgaagattagaaaagcaaggtagcgagccactaggtcataccactccttcaggctgaatgggctgattctgctgcctctcctcagcatggctgtagaaccctgagactggagagtgaggccggagaatgaaagcctgatatatagaccttgctcctgtcttatatacctccctagtgctgggattaaaggtgtgtgcccggcttctatgactcgtgactggctttgctttctgaatcctcaggcaagctttaataaatcataaataatatatcaccacactgttgggtatgaagtaagtaaaaatgttttcacattctataggctgccattttgtcccattgacattgtcctttgctggcagaagccatgctgtcacccttggggtagttgtgttgtaaatggagttccttagacagcaaggccctttggagaatcccatccatttggcaaggacctatggatacaatactgcaaactcctgcactgacccgggagctcatgggcttcaggattctcttaacttttgctatgtttattcttatggaaactcttggttctaccttgtcagtcatgattatgcctgagtttactgggaacaaacgcttttacaaagaaactaaatttctctgctctgttacagaaaccagtttttctagttgtccctgctgcctttgcagtcatccttaataagcaggaggaactctgccttgaaccaccccagccgggtatgggggtccctgggatgagggttcttgaagactaggtgggtaaggattcagcggtgacaaacagaaacaaacaagaggcagtttgaatctgagtgtgttttgtagctttcaagcaaggctttttatccaggataaaacatagcttctcagaatttgtgttcactgaagcaaacccagatagagcaaatgacatcatcgttatttggcacagtaacatacaacttatccaaagcgaacaataaatcagaaaatcattcaaggctaaccacagctaactgcctattttgtgatcagttattgtttaacatttgttgtctagctcttgtgaatctttgaaatattgagctattttgactttttcttatcaaaaaactttctttaccaaacttttaaacctactcacaattacacatgtacagtcctatgaaattttattgttgggaaagttttcattaatactatttgtacttatgtgaatgacataaatgatttgaaaagcgctggttttcctggaaaccaggtcatggtcagtgaccacaactcagaagatggtttctcatttatatcatttgtttaaaatgtcagcgtaggctttcaggaacatttccttaatctgagaaaagaacagaagagcagagattgccatgagaactatggctcaatatttttctccggccaagagttccacaaccgtttccaggaaaccttcttttgaaattatcacctcagtctgtggaacttgtcacacagaatctactggatttggtgtgtcagaactcactaagattaatgattattgcttattcaataccaaaaagagaataaatatattccaaagaacataagaaccaacaaaaacggtttcttaaagatgacatttaagctggagagatggctcagcggttaagtgcagtgactgttcttccagaggtccaaaggatgatccatcctaccacaaggacatgtgctcaactatgttcatagcagctttattcataatagtcagaaactagaagcaacctaaatgttcctcaactgaagaacagttagagaaaatgtgatacatttacacaatggattattactcatctataaaagcaatggcatcataaaagcagcaggcaaatgaatggaactagaaaaaaaaatcatcctgagtgaggtaaaagagacccagaaagagaaatacagtatgtactcacttacaagtggatatcagctgttaagtaaataataataaagctacaatccacagacccagagaggctaagtcacgggaggttctagggaagatgcatggacctccctggaaaggggaagcagaaaagattctgagagtgaactggaagcagatatggatgaaaacagggaggatcaggttgcagggaaggatggagatagaggggggtgggatatggaaagagatgactagagttggagtgcattgggggagtgaggtagaaacctaatgcagtggacaatccctggaatctatgacggtgaccctagcaaagactcctagtagtaaagcataggaagcctggaccatccatcttttgtaaccaggcaaggcttccagtaacccagccacaaaacattccaaccacctacaatttgtcctgcctgcaagatgtactggggcaatggtggcctggaatctgtgggagtagccaatcgatgactggtctaatttgtggcccaaaccatgagagggagcccatacccaaaactgcctggataagcaggaacctaaggctggatagcccagagacctagggctcaaaacaggtatcaaaacaaacacagctagcaaaaataaataaataaataaaaataaaaatagttctaaatgatgttcccctatagtcatagatcaatgcctagctcagctgtcatcagagaggcttcgtctggaagctgatgaaagtggatacagagacccacagctaaacattagagaaagagctcaaattggaggtctctatcaggtctctccctttggagcctggggaaccccatagaagaagaggtgtgtcactttgggggtgggctttgaggtctcctattctcccagctgggagttctacatcttgagcctcaggcaacaggaaatgaactgagttccacactgatcatagcttcagaataggagacctctaagcccacccccacagtgacacacttcctccaacaaggccacacctcctaatagtgccactccctttaagggccattttctttcaaaccaccacaaccactcagcacaatcaaagtccaaactgggagtctgtattaaggtggccattgtctgcctggagagaagcacttctcacagagcagcttccagtgcatttaagaggagatttattgtggggcgcaattaatgcgtaccacaaaaggagtcagagcaagtttgatgagcagatgttttattgggaaagtactcacttgatggagtcagtcttataccaccaggcaagtcagggaataaagagagccgcctgcgtgtgaccctcatatttaaggtcttgctatgtcactctgaccacacccaattgtgagtgttctggatcacctgtgccagcccccaagagggcgtggctaacatttcccctacagagattaaaacacaaaaaaactacatccagttggcagttgaagggggatgtaaagtaagtggtttaatggaagctagaacatgctgttagctggacattttgaccttgagtttctaaaacagtcttgggttctttcccattggacttttaacagagcagatagaaagggagggaggtcaatttccgtttaaaccaaagatggctccagctgagacaagatggaggaacctttgccttgttacactccccactgatcttagtgaatgagtcaaatcctagactcatccttcctcaaagaggtgtaaccggccctaagaaccattaatttgactgaattaatcctttgctttacatacagaccatgcaaatttttagtgtgtatatgcatttaaggtttatgaaatttcctggtcctgaattccttctttttacttactctttgtgcctttcgcatcatgcaccttgatcacattcatttccctgtccctttgcatatgacctccaaccctgcaaccccaaaaaaaattttaagagaaaaaaatttaaaatgtcatcatagctgcagtgtgacacagtaagccacgaggtaaaccctttgtccattatatctttacttgcaagtgttcattacaaagtcatcggtctggtttgaggcctctggtttctcctacactgtcaatactgggccctcactgggactcctcttggatatcctgttgttgccctgtgttgtgcagatcatgcagctttgggtctgctggtcaggccccttcacatgctccagatgatcacagatagagtggacgctggggcagaccaggtcataatcctggttctgtgcctgggcagctgcagggttggtcagtgatccagctcttccatgtcttcaccaccagggtgagctctccagcactgccccagataattcacctcttgcagcaataagcaaggggtagagagccagttctccggccttcatgccttcagagtcagctttcccacacctacaccatcagggccaactccactgtgttgtccaggccaggtgcaccagccactctcccgagctctgcagctggtgagggacagggacagccctcctgcccccatgacaccaaggtcagctccttcacctgtcctaggtgatggggggtagtgatctcttctccccaaatttggccaactaatttaaagtgtaggaccccaccgttaatggattcagagagaaaattagaggcccagccaatgctgatagcagagtaggtagccagggaaccaagagaacagagactggtaccttttatctgattcaccaccccacagcacgcgcacacacacacacacacacacacacacacacacacacacacacacacacacgtgtgtgtgtgtgtgtgtgtgtgtgtgtcttctgtctgtctgagctctatctcatctctctgtctctctgtctctgtctctgtctctctctctctctctctctctctctctctctctctctctctctctctctctccctctcaggttttccccaaacatggcaagagcgtctctaattacatctgatcaattagcatgaaaacaatgggcttctcccaaaccatacatacttcccatttcgtgagaagttagtctaagcctctctagttttgtaggaccacttcctcaagggagttctaattcagaaatggaaacttttaatacctctaggtcctgatcaacctgtctgcttagttccttaacattctcatctctcctcataaaagctgaggacggtgtctatggcttcctgctctgaccaggacggggaggaagacaagcacggttctttttctttgtagtccagggtccatattaggatgcattctctcttcttccccattatatgggtagaatgtgtaccaagattcataaaaggggcttcttagcttgagaatgtacatcaaaagaagcacatacagtcaaatcattagtatatgcccaccaagtagttgtggggacacagtaatattgctgttatccaggttaattaacccaaaaggcagaaatcaaatgacatcagaatgaggggatgtgcctagattaaaggtttggatattagcttccagccccatgtcaaagtcctctgatgttaatttggactctacccagtcacagtgacttctgtcagccaataagctggcagtctggttagttcctatcctgatgtagttcaggggccaagggtctaagcacaaccctcaatctcagcagatttcaggccggaaatgattaactaagctgtgtatcttggcaagagtagaaaattggaatggggatcccctcagcttcctggacagcaggaggtgggactctgatcccaagtatgttaagtactttagatgggagatttgctcaaggtcttagcagaggtaggtggtctttgttaggatccaatgatctgggggaagggggttttcctcccagtctaaactaaattaaaaagccactgaaggactgctgcaagagttatagaccttggactatagactgctactttatacatcagaggctacctttcttggctaccagtaaaggcaaaaggagcctatctcaaagtaggatcccaactacaaagactgagacaggtttaagagttcttaggtgtggctggaataggttcttccatgttgccactggataccagagtttacagaaatagcaaggaggagcactgatccccaatctggactgggattaaacaaaaggcttttgagactttaaaagcagtcctgattttggctccagccctgtcacttccaggtatatcaaaacctttccatctgtttatcctccaaggcaaaagacattacaaaaggagttttaacccaaactttggggccataaaaatgccctgtaacacacctgtccaaatgattggaccctgtagccccaggatggaccatctgtctaagagctatggtggttactgctagtctaattttttaaaggggggaggggtaactctgggtcaggatcttttattgttgtttttcgatacagagtttctctgtgtagccctgactgtcctagaactcactttatacaccaggctggcctcaaactcagaaatccacctgcctctgcctccaaaatgctgggattaaaggcatacaccaccactgcctgactctaggtcaggatcttacactcatagcaccccacacagttgaggctctcctccaaagaacaccagaactctggctgtctgatgactgtgtgacacaatacccggccctactcctggatcatcctgggatccagttcccgaaacctacccccaccatcctgctactttcttgcctgatgacagcccacaggtgcacatccttgattgtcagaagatgaaagataaaaccagatacataggagttgtagtacttgcttttactgaactgatttaggcccaagccttagagccaggtaccttagcccatagcagaactgatcaatcaggcccaggctctcagacgaaaaaagggaaagcccaccaccatacacacagacagttgctatgtttttactaccatgcatgtccaagtgtagagaaagagggcttctcaccactatgcaaaaggacattaaaaaacaaagaaaaagtcttggtctttggctagaggttatgtggcttcccctacaagttgttaccctccactgccaaggacatcaaaaagatgactcccctgaggcaggaggtaaggaggcctctgatctggctgcccaacaagtggccctaagaccagtggcccattgatattctggtgaagtagccagacctggtgttgcctgagacaccatggtacaaccaagagggaataaaggatgcaaaaagaagaaacagacagctcaaagccacaggttggtggaggacaccagagggaaagtcattctcccagaagaactggcaggactctggtaactgaccttcacgaagctactcatcaagggtccaaaacctttcttagttattcagaccaaggtatgttatacctagactggacagcctggcatggaacatctcagccacataccaggtctgtactctgatgaatccaaaacagagagcccttacccaggaagggatctgaatgagaggacaacactccagcaaacttggggaaaccaacttcactgagatccagcctgccaaaggagtttataaacatttgctagtttttatacataccttttctgagtaggtagaagtgttccccgccagactaaaactgtccaaaaagtagctttaaaggtcctcaaagaatgggtcctctaatttggcctccccctaacaatgggacctgacaataacctggctttcatagccaaaaactcaactattagataaatctttagagacagattaaaaacttcataatgcatatagatctccgaattcttttttttttttccgagacagggtttctctgtgtagctttggagcctatcctggcactcgctctggagaccaggctggcctcgaactcacagagatcctcctgcctctgcctcccgagtgctgggactaaaggcgtgcgccaccaacgcccagcttagacctccgaattctacactggtaaataaataagtaggatgttaaagaaaaaaaaattaacaaaactcacattgtagtccagtgaagtgtaaatagatctacttcctttgttttgttttgggtttggggctcactgcaccacatataggaagggtttcaccccctatgaaattatatttggaagactttcccaactgcttccccagctcagagaacagcagttgtaaaaactctctaaccattcctttctcaagtcactacagggcctccagtccttcataaaggctattattcattgtactatctgagagatccagctgacctccaagtccaccaacaccttccccttgttcaagcccagtgatattgtctgggtcaaacaaatagccaaagagatgctgaaaccatcttggaaagatccctacacactgattctttccacagccatagccatggaggtagttgactttatagtgaggatgcaccacacccaggtcaagaaagcagaagtcactgatgatgatacaatggactatgagtatgaacaccttaaaactaaggtctcagtgggccctggcccttgtactccctgcctctttgcttccctctgaatcttgtgtatatgagtgcagggtcatggcacaaccccaaccaccaggccctgacctgggaaccaaggagaaagatacaagggatgtgatagctagagtgactattgaccggcaacccagatcccgtcttcaccattgctcactgatgcctgcttcaaatgtctgattgtattggagaaagacgtgggagtttatcttttgagataggaatgcagagtttacaggcatggcctgtaggggaagctgtagccacgccttcttaggggctggctacaggagtacctgagggcttgtgagggcgtggtcagagtgagtagggggactgcgttttcggtttcggtctctctttgcttcttgctgtacagactaccaccggctggctggttcgctctgtaagtaaggcttttccctattaaatacccttatatttctacctgactccgtattggtaatttcttactataatggccctctatgcaagtgggccctctagttaccaagaacaaaggagtttccattgtaaaaaatgaaaacatccgtgtgtgtgtgtgtgtgtgtgtgtgtgtgtgtgtgtgtgtgtgtatccccctcctaagaaacatacaataggaaaatataatctaatggccatgaaaaaagataattacagaccaatatcccttatgaacatagatgcaaaaatactcaataaaattcttgtaaacccaatccaagaatatagtccactatgatcaagtaggcttcatcctagagatacagggatggttcaacatatgaaaaaattagtcagtgtaatccgccatacaaacaaactgaaagaaaaaaatcacatgatcatctcactaggtacagaaaaggcctctgataaaatctagcaccccttcctaataaaagtcttagaaagattaggaattaaagggacattcctcaatataatataacaagcctaccatcagctctaatggaggaaagctcaaagcaattccactaaaatcaggttgtttccacactcttcatatctattcaatatattacttaaaatcttaactagaaaaataagacaactgaaagagatcaaagggaaacaaattggaaagcaagaagtcaaatgtctttatttgcagatgataaaaatcataaacctaagtggacacaaaaattctaccaggaaacctctactactgataaacactttcagcaaagtacctggatataaaattaactcacaaaaatcagtagccctggccgaccgatccgcaactagagccctcatccggtggctgatggaagcagagacagacatccacagaaatagactgagctgaaatctgggatttggttgaagagaaggaggaatgaagatcgagtgggtctgtaccaggttggagaaacccacagaaacagttggcctggacaagggagagcacgtcgaccccagatgctgtctggggggccagtgcaggactgatccagcctcctgaacatggatgccaataaggaggcctctgcactccagggagcctctggaagtggattagtggtttttcccaggagtaggaggggactttgagggcccatcccacgtgaagggaggcactctggccctggacacatggggaagggcccaggcccagcacaggaggatttggtggactttgcagagcccccgttgagtgtcctaccctgcctggggagtggtgggtgaatgggtgggaggtaggttgggggtgggggagaagggagggagagggagaagggacttacatgtgaaacaagcttgttccctaacttgaattaaaaaaaaataaaaaataacccccacagggaaaaaaataaaatataacccccacaggaaaaaaaaataaactcacagaaaaaacaaaaatcagtagccctcctatatacaaatgacaaatgaactaaaaaagaaatcagggaaacatttttcacaatagccacaaataatataaagtatcttagaataaactcaatcaagtgaaagacttgtatgattaaaaactttaagacagtaaaaagaaattgaagaagataacagaaggttgaaatgttcatggatcagtacaattcatacactaaaatttgccattctaccaaaaacagtctacaaattcagtgcaatccccatcacgattctaattcttcacagatttttttagaaacaatcttattttacatatcaatcgccccattccatcaccctcccatcctcccatgccccccactgaccccccaacctaacccccacccattccccaaggatagtgaggccttccagaggggatcatcaaagtctgccacatcatttaggggagggcctaggccatcttttctatatctgggctgcaatagtacctctacacagggaatgggctcccagagtccatttgtgcactagggataaacactggctccactgttagaggtcccatagactgcccagacctcctaactgacacccacattcagagggcttggtttagtccaatgctggttccccagctttaccactaggatttctgtgtcctcactaggtcaggtcaactgtttctgtgagtttctctagcatgatcttggctcctttgctcatccctcctccctctctgcaactggattccaggagtatgattcagtgcttagctgtggatgcctgcttctgcttccatcaactactagatgaaggctctaggatggcaaccacggtagtcatcaatctcattataggggaagagcatcaaaggcagcctctccactactgcctagtttcttagttggggtcatccctgtggatccctgaacatttcccttgtgccacgcctctctctaaacctgtactggctccctctatcaaggtatctcctttcttgctctcctctattcctcccctgtctcagtcttcctgatccctcttgttctcctcccccctcctcttctccccttctctttttcctacctcccttctcccccccccatgatcccaatttgctcagggttattgtcctttttcccttctttgggggaccatgtgttttactcttggggtactccttatttcctagtttctctggtggtgtggatcgtaggccggtagtcctttgctctatgtctagtatttgtatatgagtgaatacataccatgcttgtctttctgtgattgggttaccttgtgtaggatggtttctttcagttccatccatttgcctgcaaatttcaagatttcattgttcttttccactgagtaatactccattgtgtaaatgtaccacattttctccatctattcttcaattaaggggcatctaggttgcttccaggttctggctgttacaaacaacactgctatggacatagttgaacagatgtccttgttgtatgaatgtgcattctttgggtatattcccaagagtggaattgctggatcttgaggtagactgattcccattttcccgagaaatggccatactgatttccaaagtggtcttataagtttgcactcccaccagcaatggaggagtgtttctctttctccacatcctctccagcatagactgtcattggtgtttttgattttagccattctcttcacagatcttaaaagggcaattttctgcatcatatggaaacatacacaaaaaatcaagatagataaaatgattctaaataacaaagaacaggagataacaccatccctggtatcaaattgtactacagagctatagtaacaaaaacagacatgttgatcaatggaatcaaattgaagacacagacacatatctatacacctatggacacctgattttttataaagaagccaaaaatatgcagtggaaaaaagacatcatctttaacaaatggtgctggtcaaactggacagctgcatgtagaagaatgcaaatttattcatatttatcaccctgcacaaaactcaactccaaatggatcaaagacttcaacacaaagccagatacactgaacctgatagaaggaagaggaaacagtgaggcatagtcttgaactcactggcacaggaaaagactttctgacagaacacagctcaggcactaagacctacaattaataaatgggacctcataaaactgaaaatcttctacaaggcaaaggtcactgtcattcaaatggcagcctaaaaaatgggaaaagatttttaccaactactcatctgatgcagtactaatacacaaaacatacagaactcaaaaaactaaatatcaagaaaacaaatacccaattaaaaatggcatgcagatctaaacagagaattctcaaaaaaaaaaaaaaaactgaaatgactgagaaacgcttaaagaaatattcaacatccttagccatcagggaaatgcaaaagctattttgagatttcatcttttcttagactatcagaatggctaagatcaatacaacaagtgacagctcatgctgtggatatgaagtaaggagaatgctcataaattgctgatgacagtacaaactggcacagccactatggaaatcaatgtagttgttcctcaggaagataggaatcaatctaccttaagatcgagctacaccactcatgggcatatacccaaaggacacttcatccaaacacagaaacacatgctaaaccatgtttattgttgctctactcaaaatagtcagaaattaaaagcaacctagatgttcctcaacagaagaatggggagaaaagtgatacatttatacaatgaaatattactcagccatttaaaaaataatgaaatttgaatgtaaatgggtataactagaaaaaattatcctgaaagaggtatcccagatctagaaagacaaatattgtaaaagctgtgagacctgctccagacctgttccataggtgaaatgcttctcatgagtgaaggaaggggtaaaagatttctatagtgacttcacacacaatctgagggtcgtgctctgtatttcctgtgccatttattgttctgtttctactctaataatcctgttctacttctaacttctccatgcttcttcttctagcttcttctactccaaaaattctcctccaggagccttgaagtggtaaagaagtttctctcattggtcaaaaacacatacctatgggaagaataaggaactgagccatttaccatgagaacacaaaggcccaaagccataggagcaaaactgcaactagacagggagggtacagtgcccaaggataatttcaagacacagatctattgttattagactggcaagtgaagaattaccatgcttttcttagtaaccttggtagacatctgtgactctgaccttgtgcaagctttctttttacaaaaagcctttagtctagtttgatcttgctctgaggtgaaagtgagctaattgtgtgtagtagtctgagaaagagaacaaggcaggctattaagagtcagcagtacttatgggacaaatagatccagttatgaaacatgtcccagtatatattctacatataaaattacatagctaaatgaaaagtcatcttccatacaatgcacacaatatgtgcccagtaaacaattaacacactgtagtgctgtggggaaaatccccaagctgaaatgtgagagaaagagctctccacacaagaccctgcaaaggggacagctgacacattcagaaggcagtattccttatcatcttgcagataaggttaagatatgcacctctgatgataatattcttcatcaccttgctaaatgagttatgtccttcaagagataatcagtctctgatggactgacccctgaaatatgtgctgagctctcactgaataattcttcgatctgtagcaaaatattatccttgccctgctcagccatcatcagagaagcttcttcctacatcagatgaaaataaacacagagaccacagccaaacattaaggagagtgtgagagaccttggaacactcagccctaaatgggatgtctccatcaaattcctcccctcagagctcagggcaccctgtggaaaaggaggtaaaaagtgtgtaagggccagaggggatggaggacaccaagagaacaagactcacgaaattgacatgagcaaagctcatatgaactcacacagactgaggcagcacacagagagcctgcacaggcccataccaggtcctctgagaatacattatggcttccacttgggtgtttttaatgggattcctgaatgtgccaatgggtggttctgtttcttgtgtcttctctcgcactcttctctttctatttgtttgatttgtccaattccaatgttttagtttttgctttaccttattttattttcttatgtcttttttaaaaatttaaacaagaaaaaccagcattggtatgtaagaaaattacttaaggaattgatatgcagttgtagtagcttgagaaaaccaatgtaagaaagctgtggacctactgtgcactatacatggggcagagtgcagaatgtttttctcacaaggtggccttctagaaagaactgaataaactgtaagtggatgcacttgaaagcaagaacatgaagggaatgccctagcatgttcatattatctcatggtaaaagcaaaggcctgggacaaatattcttggatctttgcacatgatcaaagatggtaggacataacaccatatgtatttcttcactgtacttgtattttcttaaactaactgtaaacaaccctttattgttgtaggataaccttttttgtacactgtgcagatgtgtcactccaattggtttaacaaaaagcttaatggccaatagctaggcaggatttgggggacaaagaggatgctggaagaagaaagaaggagatgaacagcaagcagggtgggtactatggagatgaggtaagaaagccatgagacataaagtaaattaatagaaatgtgttaatttaaggtataagaattaattagaaacaagcttaagctgtctgctgagttttcataattaataataagtctctatgttatttttttgtgagctggaggaccaaataaaaaccagccacaaatagtgtgcaatgtgggggtatgtatttccacataagacctgagaacactttttaaaaggtttcaagcacacataaacaaagccaaacgtggcttcctagtcacaccatctctcttggaggccacggtacggagaagtgtctcccagacactgcctgtgggtttgagccaccagtaccctgacctaagctgtggagcagtttaaggttttgctcatgcacacagaaaaggttacagatacacagtaaagcagtttcagatgaaaacaatgaacaaaaaaaaaaaaacttctaaacaggttacagtgtgtttaacaatgtgcataggcttaagggggaaaaaagaaaaggatatagacagtcataaaaatagtttaaaaataataaaatctttaaagagagaagtaaaataataaaaaaggataagccacataaggatgggaaatattataacacagggagttttgaccttgtttggtgctttgttaattttgaatttcttgaatgctagtgaacagacaactgctgagagacattggattgtggaagggactgctaaatcaaaccaacctatatactttaataatgctttaattttaaaatggaaatcaaaaaatgtattacattgggcaacatgttatacttttgtttccattccctccaggttaatagagatcagatttgaccaggggatacctaagtatcttaggtacagatatgggggaggaagtcaagaaagactacaggatgggtgacctgtaagctgatccctctatgtggcaatagctttgacatgagatgagacatgaaaaatcttgtggctacagagtcctcatgactcattattgaatgataccttttcatatggcatgaatagcaatgggagatatcattctgtatatatatatataatatatatatatatatatatatgtatttctctcattggctgatgaataaaacactgattggccagtagccaggcagaaagtataggtagggctaccagacgagaattctgggaaaaggacacagagggtcagtcaccagagagatgccaagtagctgccgaaagagtaacatgctggagcattctccagtaaggcaaaaccacacagagatacacagattaatagaaatgggttaataattaagagagagctagcctataagaagcctgagccatcagccagtttataattaatataagcctcagtgtatttacttgggactaaaaagccacgggaccaggctgggacagaaactctatctataagtggcacccccaatgtggggcaagaatttccacataaaacctgacaaaagcttaaaaatggttctaaacacacaaaaacagagccacaccaggattcctagtctcacggtcttatgtaggccatggtacagagactctgtggcactggggcttgaacacaacatggtggattccagtcaaggtacgtgaaggccacatctccaagctgcagagcatgttgcatggcagatttgtcttttacttatacagacaaaaaaggatttatgggcaaaaaaaaaagattaaggttgatggcagcatagacaagagttgaggcaatgaacacagctcccgagctgtggcaaacgtacccccaccatgttagaaagccagcagccaaaacctctgctttaaacatagccatgaagttcagcagattaaagactcacgtggtcagaaaaagatagagatatacggtgaagacagattcaaagagggaaaaattctgaacagttcacagtgtacttaaaaatatacataggcttaggagagaaaagaacaaggatagagaaagttcttacaaaagaaatagagtagctgtatgtggtggcacatacctttaatcctagcactctggaggcagaggcaggcagatctctatgatttaaaggccagcctggtctacagagtgagttcaaggacagccaaagttacacaaacactgtctcaaaaaaaaaaatgaaaaataaaactaaaagaaatagagtttttttctttaaaaaaaaaaaaaaaaccatgaaccatgtgtggaaagtacacagagagtctggatactgtatgttattgtctttgaattgtttgattgctgaggaaagagcaacagctgttgaaaggcatttgattataaatgctgctggattaatccaacctatatagtttgaaattttgttgacttcaaaagttaagtctaagaacatgttactttggaaaagatattttgcttttgtttccatagatgaaaagctgtggattccttccagactaacatgggtttgatcaaacaagaccccctgaagcagtggcgcaggtgattcaacatccaaatcacccaagaccatgcagcctcagactactacagccaggatctggacaggtttctgggttttcacaggatccccttgggattgacaacacccccaaacagcagaaaactgtttggagagaactacacccaaattctaaaatactgtttataaatgtttgttttcatgtaaacagggttagttataaatggctaatgataacagccaatctctttctaaaaaacaaaaggaatatgatatagaaattaacactttgcattggtatggattttggtttattgatacaaatttagggtcaattctgttataggtatatttttactcctgtttagatattgtgtatatacagctcttttaaaaatgtaatgtataattaaatacaggttatagatagtcacctataacagtcaaaacttatatttatgttaggttttctagatatgcagagatgtactttaaatgaataggtatccttcaaaacctttcaaagatcttcagaatatggcatttaaaatggtttttcatgacaaagagacacaactgttcctggcaacaccaattatgtcagagaggaagatgggcatggaagaaactcattatggagtttgccttccatatggtaacactagccatttgggcaagaaactgctcttgcctggactgtttgaatgtatgctgtacaaactggacatgcaggacccacaggaaactgactgatgaactttccaaaacaatatgggacagttcttcatggtttctgcttcatggaagagtctgctagacagtttgaagtgtagcgccagtactacaacacttctcacagatccggttgaggggcttgaggatttaaataaagacaagacagctggtcattcatgcagggagaatgtcatttattgcaacaagagggaagccttatttccagtcagcaggcacagtagaaaactacctaggtcagaagttcacgttcccaggcccatctggcaatcatgaatggacagataacaggaacttgtgttcaggccttctcggaggaggcaaacaagatgtacttgctagataagctcctaatcacaagctggtcagaagatttctgtgggggaaggccccaacaggaccatatatatatatatatatatatatatatatatatatatatatatatatatatatatatatctgtcttaggttgctccagacatcaacatctgccttaaccatcattgaaaagcttgccttggccccacagaccctctgtcttaggttaacagacctgtcgtccctccccccacccagtcttaaacgtcattgattcctttcttgtcctgcaggctcagccaaacctgtgctgaggggtaatctgctgccaaggaaagcatgattttctttgtttaaaaatagtgctgcacttgccgccttcctattcggaaaaggcagactaaggctaaagcagcgctgcccggggctataatcccgagggctagcggcccactccattccttaattaatcgacctgttagctgcagtccctttaagagagagtctcccgaaagggcaggcaccctggtctctttaatcttaataatttgagtagctaattgagccgtgtaattagtgaaattaagagagaagtttgctgattaagatttaaagtgcccaatcgtactagagaattgatattattttgggaacttaaggcagaggcaacctcccctgagagcttatccagcatgcctgccatggcaactgactgagagatagcgatgtcagaaactatagctgccagaaactatatagctgcagtggtggcagccacaatggctgccatgacatcaaaaatccctcttgtgttgtgtaaggatgagctagttctctcccaagtgttccactgccttaggcatgataacaggaacacgaaccaccaaggctggtatttctccattctaacagcttttcaagtggcgttcctggagggaacaattaagcacttctcctgagagatgttattgaatatgacaaagaaaagggtggaagaacacacactgcaaattttaaattacctcttgggcaaccaaagagactgcatctaagcaggcataaggccctcaaaggaacgtacccaaaaaagttggcatgactccagtttaaagaggattaattaagtggacccggccaacaccttgggccagattgagggggtgattttaaggccaacaacagaggaaatttgattcttctaaatcctttctgatggctgcctttcccaggctaaggttggagtgaccataaccggccacacttgaccccggcatcggggtcttttgatggctgatgcgtatcagcaggaattaggagcacccaaagctctagaacccaaattggggactctctttccggtgagaaaacacaaacagaccctcgggcccacaccaaaaccaggtccaaaggcccaagggaaggtctttccatttaaccagaggttttttgctgtgcagaggactgccaatgacgatctgctgcagagttaccagaagcatccacaattaaaaaaatttaagatatagagagtaagtgatagagtagagtgaggggagccaagatgaccctcaaagtccccctttttttgctttagctaaataggctttcaaaatgagatggacacattccacaatagcctgcccttgggggttgtaaggaatagcagtctttggggtaatttcaaagtcttgacaaaaatgattgaaacctctgctgacatagacagggccattatcagtcttaattttgtttctggacccccatgtaagcaaaagcctgtaggcagtggcttttaacatcgtccaccttttcaccagaatgggcagaggcaaatatcagatggaaaaagtatctacggaaacatggacaaattgtaatttaccaaaggatggcacatgtgttacatccatctgccacatgtgattgggcaaaagtccttgaggattaactcccaagtgaggtacaggaagaaattctacacaaagagagcaatccttaactatttgaacagcttgttctttggttatctcagtatgaaagcataaggaccctgcgctgagatgaaagcgcttatgtaaggattgtgctctagagatctcttgtgaaattataatgatttgagtataactgtcggccgtgagatttcctttgctgaggggtcctggcaaaggggtatgggccctaagatatcccacaaatacaggtttgctccattgccatagaataccctgtatctgtaacaaactcgtttgtaccctggagactgggatgacataggcagccgtctccaagggttggatgatatgagcaacgtattgaccattggtatagatgtttagtacccccatggggaagagttgtagagccatggccaaggctaaaagtccgaccatttgggcagaagctgcagcaattctggctgtcttaatgatgggataagatacaactacagctgtaccctttgaagaaccatccgtgaaaaccactcgccccttggaaataggctgagagactataatctttgggaatatcaaaggatgcatcttaaaaaaggaaaccaaattattggatgggtaatgattatcaaaatcactctgggtaacagagaaaaatggcccaatcacagctattattttgtagccactctaattgttgacgagacaaaggtgtaacaacctgatgtgactccctaccaaaagtttgtaaggcaaccttttgtgctttaaataggagtgctactatagcttggggatagaataccattgatttagatggaaggcttgagaatgaacccaaagaataagactcttgccaaaaaaaaaaaaaaaaaaaaaaaaaaaaaaaaaaaaaaaaaaaaacctcacgtaggagcatgagcagaataaaatactagtaattttaaaggctgggcataatctatataatccaaattagcccctactatggcctcttcaattaaatggatacactcctgtcctgatgtagtaaggactcgaagagagttgggatccaaatcaccttgtaagatatcaaaaagaggtttaagctacccagtagtaatttttaaaccaggtttgatccaactgatgtctcccagaagcttttgaaaatcatttaatgtttgaagggtgtccagctgaagactaatcttttgagggtgccccattatgaaacaagcgatgttcaagataatgatatggaaccactttttgtaccttctctggtcctatttgtaagccagccaatcctaaggtggtctgaagatccccaaaggcagatagcagtagcttttcttttggtgcagtacatataatgaattatatacaattgaggattttttggtctgactggctctatagcctgagaaacataaacttgacacatggtagggctattagccatgccttgaggcaaaactacccacttatctcttataaggtatctcttataaggcttataaggtataaggtatctcttataaggctcccttaaatttaaagatggaacactgaaagcaaagcactcagtttgattatttcctggtctctgctcctcaggggtgtattggcttctttgtgttctaaatttcagttgtgctgttatttctctaatgtgattattctcctgtttcttcatgtgggcacttagcgctatgaactttactcttagcactgctttcaaaatgttccaaaggtttgggtatgttgtgtcagcattctcattgaattctaggaaatctttaatttatttttattttttcctcaaaccggaaattgtgcaattggatattactttatttccatgagtttgtaggttttctgtaattcgtattgttgaattctaactttaaagcatggtggtctgataagatgcagggagttatttcaattttttgtacctattgaggtttgctatgttgccaagtatgtggtcgattttagagaaggttccatgtggtgctgagaagaaggtaaaatgttttgtatttggatggaatgttctatagatatctgttaagttcaattggaccataactttgattagttcctttgtttatttgttaagtttctatctggtgttcctatccagtggtaagagtagggtgtttaagtctcccactataagtgtgtgtggttttatgtgtgatttgagttttggtaattttccttttacaaacgtggatgcctttgtatttggggcataaatgttcagaattgagacttcgtcctgatggatttctcctgtgatgagtaggaagtgacctccttcatctcttttgattgattttagtttaaagtccaatttattggatattaggattgctacccccacttgtttcttgggcccatttgattggaaaatctttccccaacctttaattcttaggtaccatctgtctttgaagttgaggtgtgtttcttgtatgcagcagaaggatggattctgtcttcttatccattctgctaatctgtgtctttttataggccagttaagaccattaatgttgatgaatattaatgaccattgattgttcattcttgtttgtttttgatttggtgatggtggggaaattatgtgtgggattctatccctttttccttttggctgttggtaaagtgggattatctattgcctatattttcctagttgtagttaacttccttgggttgcagatttccttccagaattttctgtagggctggattggtggatatgtattgtttgaatctggttttgtcatggaatatcttgttttctccatctatattgattgaaagctttgttgggtatagtactctgggctggcatccatggtctcttagtgtaggtagaatatctatccaggactttctggctttcagagtttccatggaaaagtcaggtgtaattctgataggtttgcctttataagttacttgacctttttcctttgttgctcttaatattttctctttgttctgtatgtttggtgtttttatcattatatgaagaggagacctttttttgttggttcagtctattcagtgttctgtaggcttcttgtattttcaatgacatgtctttctttaggttgggaaagttttcttctatgattttttgaatatgttttcggcacccttgagttggatttcttcaccttcttcaataactattattcttagttttggccttttcacagtatcccatatttcctcgatattttgtgttaggggtttgttgaacttaatatttttttggtcgatgaatctatttctcctaatgtatcttcaacacctgagattctctcttccatctcttgtattctgttggttatgcttgtgtctgtagttcctgatcatttacccagcttttctatttccagcattccctcagattgtgctttctttattgtctctatttcagtttttaggtcttacactgtctccttgagagatttgttgatatcttgtattttttggtttgtttttttcttccatttctttaagggattttctcatgtcctctttgagatcctctatcattttcatgaagatgtttttaaggtcattctcttctgcttcatctgcattgtgatgttcaggtcttgctggtgtatggttcctagtctcccatggtgtcatattgggttttctgttgttgaatgtgcttttacattgacctcttctcatcctttcctctggtgggtatagtatgagtctcttcctctcctggtgggtatggaaccaaggttcccttctggtagatgcaaacagttccaatactctgatgtctgtcctcttgtcatggatggaggcagaactcccacaggggcttcggcagtgtcctggtgtgtcggatcccgctgctgatcttggatccagcaagcaaatccttggtgtcagatgcctccaagcatctgacccttacccgaaactggaaaacctcatgtacagttttaaagaagctttttgctcttatgtttgataccagtgccttgctttgtagacaattgggccagttggtcccccataagagagtaggaactagcagcacccatgttcaatacacccgctccttaccttaatgaaaatgctggccagccttcacggaaaggaagagagtagaagaagaataagggaacatgaagcttgatagtatttagaatcagctaggagatggttaggtattcctccaggagagtgtatgagagtttccagaaaggatttaagtgaggaagaaaatatagcttaaatctggatagaatcgccgggtgttggtgacatgtgcctttaatcccagcactcgggaggcagagacaggcagatctctgtgagtttgaggtcagcttggtctacagagcaagtgtcaggataggctccaaagctacacagagaaactctgtctcgaaaaaacacaacaaaaacaaaaacaaaaacaaaaatctggatagagtcatcccatgggggacctagatggaattaaagaagaaaaagacaactagcaaagtgccagcacacaccatctgcatcctgatccaccgaaatgtgagcactaaaccaacctttggctaggcaagcctaaaaggttaacgtgtacatactcctgagaatcaataagagagttcaaatactcatttctctacttcaccaactagaggtaaaaagcaactggtgcaggaagaagtgggaagacaagaaaaagtccctgtaataatgtatattttgtaaattttccatgatttcttatccttgatccatatgtaaacatatatcctatcatcattgaaatgatttcattttctgttggtataattgctgatacataatacatattcttgtaaaccctgttacacattttggtattataacatctaactaatatacaagaaatggaaagtcataaggacactaggaaaggcagttattcagttgcttgactcttcaaatgtctggtgagtgcatttgatggttattaagaacttacgtgtacttaagtatttgtctgttggagtcctagggaaaatacaagactgtctgaacccataaattgctgcctgtcatcttctgacattttaacttaaatatttgacttaataacaccattccatctctgtacttaagtggagaattttgtctttgccagttttataccaagactgagctgtttgactaaaatatatacagatatatacatttgttttctgttgcttatatttcaggcttttgcctacttaacctgccatttggacaaccttaccatttggaacgctggtcttatatctattggccttgactaaatggttattttgttattgtgtatttgcctgtacatcagaacaactgtagtaactagcactattcaataaatttataagagatctaaaatttttatttttgtcatagttgtagatttagtcttctgagtcaaagcttctacttttgcttcaaaagcagaagctggggctggagagcactggctgctcttccacagaacctcggtttgcttcccagaatccacatggcagctcacaacaacctgtaactccaggcttataaggagccaatgtcctcttctagcctccaagaatactgcattcacaaggtgcacagacatacagtcagggtttgtacacaagatagacagatagatagatgatagatagatagatggatgatagatagatgatagatagattatttcaaaaaataaacatttattcatgtattttctctctgtgtgtgtacacatgtgtgcacatgtacaccttatttactttgtatgcatagtggagtatttgccatggcatttgcatgaatatcaaaagaccatttttgaaagtcagttatctccttctgccatgcagagcccagggaccaaattcaagttggaaggcctagctgggagcacttttacccactgagtccactcaggagagactaaaaatatcacaagtaaacaaaaaccaatgaggcaagtagattttcttttatgtaaataggaaaatataaaactgtactgcagtcatttcctctaaatgcttcttttagagaagaacaaaactaatagccagagccaacaagaaatttggcaatagttttccgattgtgcaaccaggcaggttctttcattttcacttcatgtacactgtataaagacttggctgggttaccactatcactttctacctcttttagtttggtggtgtataattcaggaactgatttctgctcagctaaacttcttaaaaattttgctttgtttgtcctgaacttttaaggacataaaagagccaagcaggagaccggcgagtgccaacttcaagatgccttctgtaagtgtcttgatttaaatggggaagtctcaatcaggtggctacccttgggacagattcagttcagtttgctggtcttaggaagagtgaatgcatgcatctaatttcaaaagttgtatgaaaattcagctaatgtgcagaagtgagattaccatgggagacaatgatttctttgcagagtggatgtttccaggtgtccacagagcttgattatggtctggggtataggaagggagcgacactgatggctcaaagggatctgggtcttgctctggaagttgtgcctgtcacttaactctttatgtctcctgtaattgccatccttccacctgcacagccaaccatagtctctccctcatccccattcctcttctgtcgccacttccaacctttcctaaagcttgccctccacacactcacccaccacatatgccaatcctctccacacacataagaacacacacacaattttaaaacatactcaaatgagagcactggagacttgagagaaatttactgactttagaaagaaaagaaaacaagacaagaaggcaagctgaagatcttggtagctgctgagacaaagggcatggaacaaaggagaaaggaacaagatacacctaataaagtacataacagacactcctggaaaatagaggcaggagcctggggcctttggtatttacattttacattgatgtgcagatttgacctcttcttgggtgacattgacctagttttagtgtacaagcctgggccaggtagtcctgacaaattaatctggactactgtcttcaagatttcaattaaagtgaaatgtagagaaagatttgttcaacatggctacactaagaagaacaaataaaaagatgcagaagctgccaccaccaccaagttcatctttcagttgtacatgagatttatatttaaatagtgtctctctttggaacatcttctctccttccaggcttgagccttgggcacataagtgacagtccagtttttcaggccaaccaaagaggaaataaataatcttactgttttgctttgtcttgaacttgtagtcagctaaaagtttcattgtgtagcctagaactcagaattctgtttaagacagaataattgttactcattgcaatcgatttacctttcacttttgttagctttcggccaggaggacataactgaacagcatcgattactatcaatctactttatacctttgttaactctgccattagttcatctttaccttgagtttgtaacaagcagccttcagatccttagcacttaccgagatccagttcaggtccattttttagcaatggaagtccagtgcttgaatatgcctcacaaacagcttaaagatatttcattattgctcttgaaatctgctctctcttatttttcttctagctccctttctagcatggcattgctgatgactggtcatgtcatttgtctctgaagaagctgacagtggttcctgtggcttcaaggagcacttccattggcttaatacctgcctagtatcaggcttacatccctctggtttcctcctctgctgagttagttcaacttaggaatcacttcattggatatttttcaccagccaaagggaagcctcatgtaggaacccatctttggggggcttcagtcaggtccagcagacttgctgggttcatacctaagagggggagtgtggattgagaaacggcaggtaaagatactaaagaaaagacagacacagaatagagccagagggcaatagagtgaatactgaccacctcaagtttatttctcattttctaatatacccaagccaaaaggcaaaagacgtctttaccatgatacaaggaacaaacagactttaactctttctttaactctccgaacagtcagtaatcataccttagatcaaatctctcattatctggatttgatggttaagacatccacaccttagaccaaacatccttcagtggccacaccttagacctttaggtcttctgactttaaccttggaagagtaaggatggttttgaactctctgatcttaagtcaaaatgaaatggagtcatttttatgggccctgacagcctcactccctcaaactaaccccctcaaaatgttactgtcccaagtaagcagattgtctcaggacctggctttatctgaaggttcatagaaacagtagaggtttacatcagaaaactgaagatgtggtaccttagcagttggaagtctcccctccctcaggaggctttttctgcaggcctccttttccctcatgatgctcatgcctcctttctcctctgtctcacttttctctatgttcttttatttatttatttatttttggttttttgagacagggtttctctgtgtagctttggagcctatcctggcactcgctctggagaccaggctggcctcgaactcacagagatccacctgcctctgcctcccgagtgctgggactaaaggcatgcaccaccaacgcctggctctgtgttctttttttttttttaagatttatttatttattacatatacagtgttctgcctgcatgtatgcctgcatgccagaagagggcactagatctcattctagatggttgtgagccaccattggttgttgggaactggactcaggacctctggaagagcagccagtggtgctcttaacccctgagtcatctctccaggctttctctgtgttcttgtataaacgctgttcacttcctacgcacagcattttcactgtctcaatgattctagacctcacttctctacctgaccaaatgactaatagtcagaggtaaaatttaaaaaaaaaaaaatttttcccacccacactggatcctcttaaagactcagtcagacatcttccccagtgcgaaagagagataatggaggacttcccaaagtcatagagacaggttcaaaatcaaattagttggcatccaaacttgttttcatgtcttctctgtttcctttgattccagatcgcaagactgcttgggaagcaaattatactcggagttatacctctcatcctaagtagtctttggtcttttattttcaggactggaactaaacatgggtgagtgtagtttaaagggggggtctttctgtttctcatacctgtaaagaagcaggtagaatcacacaatgtctaatccctctgaacatgaccatcctcctgtcactcaatgttccttcttgtgtctctgttttccagtgaaacaggtcttgcctctgactcaaatagagcccagaagacacatggacgccatgcaaagaaaaattaagaaaaatccactctgtaattaagcaaatctaaggattctagaagcacctctcgctgaaacccaaagaagtcctcctccttctgggctttcacaacccagtatcttccttcccttacaaatgaggaaatcacttaccagttgcttgcaccttgaatcttgtgatttgattcaatttgctaaatcatagttgattaaataaacagaaatttaatagggattttaaccaacaggtctttccaaggcatttataaatttgtggcgtggatgtttatgagccagccttagtgtacacatatgtgtatatatgtgagggtttgtggggtggaagaacaagcatctagaaatgtgacctgtaatcacgtatttacttagtatctgtgttcactgtttattttatatgttaaatgctcttttcatggcaggagttgggtaaatattgtaaaaatgacactgtcttttatctcaagggctttgcaaagaagacactacatgctttagtcagctgttcattgttgtaacaaaatacaagatactaaaggaccaaaaattcaaattaatagaagtttataaaggaaaatttaactccttaaatcaggagtgctatgactgatgatgcctgatctcctgctctcagagaagcagaggtgactgcccacaattccagttaacattcctttgctattgctggttgtaaaggtgccctgctggttgtaaagattccccagcccaggggataattgacagaccctgtaacccccccaaccccatgccctgtcttatctcagtcaaatgtatctcccttaaaatgtatagttactgactaactctgtactttgtatgaccttaagaaaccataaaaactctgtaatttgtgaccttcaactaaaggaccccagcctaagatgttttcttgcacattgcagtctgccacctgaaaggagccaatcagaactgttgccctagctcaccccagaccccatccgtttgcagtttttgcctttaagaagcccctagccctcagcttggggtccagctcctcttctcctgtgtgagtaacgtgctggaccccgaagcactggttactgaataacaaagcctcttgctgtttgcatcaagttcttgcctctgcctggtgacttgccactccgagtgttcaccccagagtcccacctggtgggggtctttcaatacagtctagttatgaggaagagaaatctatttagctcacaatttggagattcaaaagcatggccatgtatatggtgctcagtctaaggaagacatttcagcaaatggaagacaataatagtggaagctctcattgaggtgtgccacaacttatcaatccaggagcagaggagggtgggtgggatcagactggctcttttcataactacctgtaactgttagagcttttgaaaggaaaggcttccccactgaggtattacagctctgagagggaaacctgaagggaaaggtatcctggcaatcgggagacaaggaataccactatttcacgactcataacaaacctcacacaagagatttattgggagagaaataagaggatagctgcttctgctcagtcaagaagcagcaatgaacagagaaggaggcaggctttatacagggtgtcttggggggcagagctgggattcaatggattttgtggcttaatcttaggcttttttgttgttgttctgtagtgtggggcctggccactctgctacctcaaatgttaagatggcctttagagaagtctaggggatgggacctagctattcttgcctcccagggcttacattctccccatttttgtttactattgataaacagtcaggggttaagaaagagaacagggggtgatgttatcattagactatttcttgttgaatgggagcattgaagtcctgggggcaaggtcaatcttttcagtggggggggtatagtggggaatagaatgattatgggcctctagctcaggatctaggggctggtgatcctgttatagcaaatgattaaaagtctgtttagaaatcatttggatctgttgctgaagaaatctaaacatgaagtttataagacagggtgagactagtaggattaagaaaaacaggagaaagggggttaagaaggataatatctggttccatactggactgtcaataagctactgtaggccagagacatcaagctgtttctttgtttttggagagccatctgaaactgtcagagcttgttttttactatacctgattggttgccataaaagcaacattcctccctgaagaagagacaaagaccacctttctctgctgttagtcaatctaatcctcactgattttctaacactatggaggccagtgagtctatttgaccctggagggtaaggatggtttgagccacctgttgaagatcctgtataaacttagaagaaaactgatgataaatagctagggaagcagtcagtcccactgatccattagtgatgctccaattataaccaagagtgctagaaaggatatggcctgaaccacttcatttgccatgccatgtcactataaaccctgtaatgagaattggcaaggattcttcaccaggtacctcccctacttttggaaaaaggaacaccagggcacacaagtccctgaccaccaggtggggtaaactggagtgccacagagaatcaaagcattgtgaatgtttgagcatagggactgggtggtagtcctaagggttaaggtattactgcaatctatggaaaacagtgtgcccacaaaatgtgtcctaaggagttaaagcagtctgtgataccaaagagagagatgtgagagagataaggggtcatgtgatacttggcttagagcaattaatgtgtttcaaggaaagagagtctaataggacaatgggcaaggtgatagtgactttgaccctagaaggacacacaaccaacattctccaaagcagtcagacaaagcatttttcagtagctgatacacagaggttaaagtctgaaataagagatggtgtgacagggagatgggatcaaggttgactgatattgccaagctgacaaagttatagctagtctcgtcatcaatactatcagagatctgagaaggataaatctgtgtaacgtttgaatctattaaaaaatgaaagggtccaatccagatatagttagccatacccaagtctcaatagtgttgggggcagaagtaaatcttcaccaggtccataaagtgagaggttttttttctctctgtggaagagggacatggaaaagactgaccttattttgtctaggcaaagatggtgcaatcaattctccagtgtcctgtagcctgtccacagtctgaacccggttctgcctggcagcaggtgtagcatctgagcatcatgctcactggtcagcattgtcacaatccatggagccccataatcttctttagagatcttgggtcactgtcaggatctgaaattctttgtctgatattataagctttttagctaacattttaaatgccatattctgcagacctctgtagtattacaagtctgcctaggtaaatctagcaacttgttttcagttacttgtattaatcttaacctttgaaaacatataccagggactgagtcaggtttatctctgttattaatcattagtacttagcttgaccataaccaatgaacttgtttattcataagaatggctagtaacttgtatttcttaacatcttacaacaggttagcagcttttataaaactaagactttctattgtcaggtttacctttaaaattttgatgttttaattcctattacaaaatttttctgttgttatcaatgtaaacatctgacatacaggtggtcctaggctacccttataaaagaattttgtttttaaacctccaaagaactgagacccatgggcttagaagtttttttaagctctttgttaaacttaggtcattgtcttactgtaccataagaaataaacagctcaatttttttgttagcatatggagcttatggctgtgatcttaaatttcagctctttgatttaagcacaaacattagcaatataacataagcataaatatcctataaccttataaatttgaacaaataaaaatcttttaatgtctttttgtaataatatcaaaaataaagcacccttgatgtgtttaaaaccattatcacctgggtgactattaaatttatgttgtcaattcccagtgttactagttttaactttttaactagttttaatttttgacagatttaactataaaacagttttaatgccatctttactaaaaagacatctgaattcccaataacccaaatttaatgactagagctcagagataaattctgagctatgtccataaatgactggctgctgttagcattagacagaaaaaatatttaaaccatttttggtttagctttatgcttgtaataaaatttacgttcataccagaaaacacagatagaactttttaacaagtatacataattttcttttgggacataaacaaaacttttaaatggaattaacctggtatggtcaaaatttttaacccatattaccattataaatttagtatttgtagatatgagagcccatagtaaacagtttacattcttctctgacatttttaggactttctttgaccctctctaaatttttattaccttatgctctttctctgattccctcagacatccccatcttagacaaacctctctttttctctttgtctctttcttttcccctcttatcagtgactctcactcaggggtgcatagctgaagtgaatgccttatcttcttatttttctctaaatcctgagtgtacctttccctgagcctctctacaccctcttaactgcttgttccgtttattgtttatgttggcttaccagctctccttttatgtttttttaataactttataaattttttatctccttacaatttttctgttttacctttcattgcccagagaagtagagtggtgttctcaacaccttaagctctttccaatgctcttctgtgctgctttggtgttttctgtggacatccaaatttgcacccccatttgacctacatctactgttttaccacatttggtcttgcatcagactgatcataccacgtctgcacatagccatcacatttatacatcatccctttatttatttttttttcagtctgacttctctatctcactcctcaacaggaaccacagtgttggcataacttttcctgcccctgacaggaaaattttatacagcccttattattattatagttgacataaaacctttacccaaattccccctttttcttaattaataataatatgtaccaactttttaaatgatgataaataaatgtaacccattaggtttagatgactaaaacccatatatatttttcccaaagtatacaaaatggcataatttaacataatttggcttgggaagaaagggaggcatcgttggcgggcacaaagtgtccttggctgccagtgttttgaaaaataattttttattaccctaatgcacaataatttgtaaccaacccttgaatctaaatgaccagagcagccccggtagagggaaatccggctacagtgtcataacaggaccctagcactcacaggctgtaactttacaccaaaagccaaccctgtttggctagaagctggcaactttcaagtcagggtgcaggaatcccatctgatagcatgggagggagccgtgacgggcaggtgggctagtgagtgtcaactttgggggaccatggctttcctaagagcagcagagtcccttaaggttcacatacaccctttaggcctcactagcaggcaagtgccacccctgctgcagtcttgctctctgcactccaatggacaacagtgcaggggcaacactggtaacattcctgagtggctcaacaacattgatggcacccctccccacagcagttacagaccctctcacttgggccctgcctgctgctagacctgctggggcctcagcttcccaggaaccgatggccagctgggcgcacttagacttggaggcactcgccatttggccaacctggtacatgccccgagggcatctttttccagaggcttgttacccgtgcacccgccacagatagacgcctctgtgaaggatgcctgcaccctgcccatgccacatgctggcagtccattgtcctccagcgtggagggaggggccgggcgagtcccactccacgcagctcctgcatcaagccccccaccatcctgctctgaatgcctgcagttcacaggcttttgcctctccctaggagcttcgatgaccgctcctaggccacctgaaggctggcagtgcaggctggtctcgggacaagtgtgtctcccccgcaaggagccagaaggtactatcctctgccagtctgtaactttccacctgcaggaaaatctctgtttttcaaagggaaggggtctgtcctgttagattctgtcccgggtcatcgtccatcacgacaagacaaacagacaaacaaacaaactacaaatacagcgctgagacaaagaagaaagggcctgtacctagattcctagatttaccaatggaagtcctcaattgaacctcctattttaccaatgtcagttggggcagagagagagccccattttgcatgcctcacagacaggcaggtgaggatggagaggtagattcacctgcaccagccaggctcagctgtgagggctgcagcagtggttggagttcagagcagcagcctcatcatgtgctcagagacaggggactccaccatatgttattataaagtttaccagtgattctgggaggtggtagggcacacctttaatcccagcactcaggaggcataggcaggcagatctctgtgagctcaaggccagcctgatctacagagtgagctccaggacaggctccaaagctacatagagaaaccctgtcttaaaaaacaaaaagaaaaaaaaaaagtttgccagtgaacccgatctcccatctggggtgccatgtgtccctaattaggatataaaagattcccccattctacataaaagggtggatacctttttggatatgcatcatgtctcccacaggaccaataaggaagcctctatatgtctctggccaatgtcaacaatagtttctagtttgatcacagagaaagcaagcatgggtgcatgtggcttagaagttgatttaggtcttatagggctaagcccctctttttggccacctgctgatgagcagtttccagaccccaccatgagggtggtatggttgaactgttgggtataggtttcctgaacctcaaacctcaacactcaacaggggtcagggacttagactcgggggagaaactgggcatccggtaccagggctttcatggaggccagaggtgaaaacaaaaactgagctcaagaaacagatctcacccataggaaaggtttgggtaatggagtcacaaaattcacaaagacctagaaggcctgtgggagtatgggcagctccaaagggaaggcgggagaagagggcaggaaggggcacaatagtatatagttgggcctaaagaaactgcgggattgtagctttaagaggggaggggaagcatcatccatagtcttaaaggtcatggctggggtacctcagcctaagagtatcagaggggtgtcagacattgaacagtcacttcctcagagtcagggaagtgttacaccaaccaaaggtgaaacttacctaattccactaatgggtgagccagaaggcgaatatattgtgggtggactggagatgaggaatagaatcccagtgcagctcagaccccgaaggggagtacaggtacaggtatctgagtcaagtattacagctctgaggagaaaggcttccccaggggaagtgtttacagctctgaagagaaaggcatgccagcagtcaggaaacagagaataccacaaagtcacaccacacaacaaacctcacacaagagatttaccgggacagaaacaagaggatgactgcctctgctcaggtgagaagcagcaaagaactgaacagagctgaagaatcaagcaaataagctgaagcccacagaatgggagagaaactttgccagctatacatctgacagaggattaatatccagaacatacaaataattcaaaaaataaacagtcgaaccattcattcaaaaaaattagcttggaatctgaacagagaggtctcaaatgaagaaataaaatgactaagaaatatttcaaacactgcttatcatccctaggacttagggaaatgaaaatcaaaacaactttgaaatttcatcttatcccagtcagaataccaaggctgactcagccttgatgtgaagatttgtgcctagtcttattgtaatttattatgccatgttcagttgatatccttgggagacctgctttttttcttttttctctttttttgggggggaggggggaagaggaatggatctgggggagagggaatgtggggaagaatgggaggagtggggtagaaggggcaactgcagttaagatattgaaagacccccacggggtgggacccctgggatgaacccttgggagcggcgaccccccaagtcaccaggcagagttgagagcttgatgcaaagagttgtaagatccccagaagctcaggcctccaggatcttttcccaggaccatggccaccccaatcaccatgaggaggcagaaacttgatgcaaacagcaagaggctttaatgaaaggtggacgtttgtacaaacaggctctctcagcatgcaggctagagagcagccccgtcccccaggcacaggtgtttttaaaggcaaaaaccataagcttagggaggggccttgactctctgtccattgaatatgcgaccagagtcatgggttcctaggaggccctttgtcttgagaggaggcctgggaatcagatagcctcctgaccccaccagttggaaagcctgcagacctcaggatgtgctaactaatggtagcaatctctttgtttcatagggacccttatgtgttaattattgacaatttgccagtggggcaatctgtttccttcaagagccccttgaggagggtggccatctggaaattcttggtacccagttatcttatggccttgtaagggagtaattgctggtggctggtaaattccaggcactaagtcatagtagtagccttggtcagtttctgggctatatttctttgctaatttttaagtctttcagagcaagaggctattttattcagtaaccggcactggggaccaactcgttactcacgcaggagcagaggagctggaccccgagctcccatctaggggtttcttaaaggcaaaaacttcaaacagatggggtctggggtgagaaagggtaacagttctgattggcgcattccaggtggtcgaccgaaatctccaagcgcaatctccgagtgcaatctcccggctcagggtcgtttagagcagttacatgttcatctctgggaaccatttgttctttaactttagcagctcttccctgttaggggttgtaaatttagcttctcacatatctgcacaggaaacatcttaggctggggtccttcaggatctcattgcatagtgggcaaatgagataccatccagtcaaaaaggcagaccataaggtgtgggggccataaactacagagtttttatggttacttaaggtcacacaaagtacagagtcagttagtgacaatacaaattaagggggatacatttgactgagataagacgggacatgtggttgggggagggagggttacagggtctgtcaattatcctctgggctggggcatctttacaaccagcagggcacctttacaaccagcaatcagcaaaagaatgccaacaggagtgataaatagtcacctctgcctttctgggagcagagctcaggcgccagccatggcattcccagtcatcagaagctccccgtctctcttcccttcagagcccaagtctttccaaccttcaacaattttttgatccttcaatacaatgcatgtaaaaaaattaaaataaaaaaccattaaaataaaaccattttatttcattttgagtacttgcatgatttggataacccataagcacatcatcaaagacttggtccttgggttgacactgtcaggagagtctggatctttgtgatctggggccttgtaaagacccttatatcattggggtatggcctcaaataggatttggggaccttgaccccttcttcctcctttgcttcggagaaccatggcatgctctccaccatttccatgcggcatgcccacaaaatacctgagtgaatgctctcacctggtcttgaactggaacctcagaaactgtaagtgagcaatctttatcttcctacaattagttacctcaggaacttcatggctaatgcaaacaccttccaacgcaatgctgtacactgtgctgtgtcagcccacaccatgctgtggtgactctgctgcttgagctgctcttcctaagaatggactaactcactcaaaaagaacatccagataagacatttctcaaggtgccaaatgggagtgtgttagctgaatggtggtggtgttgttatagttattatcaccaaatgcctagagcaggacaggctagttaataaaaagaaaggagtttatctttgctctattgcataatggcaaaaacgtgtggtgcgtgtgtgtgcatgagttctctctgcctttccatatctctctgcctttccatatacagccacaagaattgaagcataacagccccaccctaatgacctgacaatccagtcacttcctaaatgttccacctttatactctgcagacactctgacacctctaaactctgacatcaattcaggggaacatatcacattcaaacccaagggaaatttaaaaatgccccttcacctttagacttcaagaactgcaatgctggataagagttagtcacagcccatccgttttcaatcagtctctgttagactcagtctctcaacttgcctctgattggtcgttctcccacacgcaaccgtcaagaacatttccatgtctcataaagttaaatcaacaaccaggagtcaatatatctgctatataactgcagagggcaataaagcctggagaagtaaggttaaattcgcttggggaagaggaaaataaaatggcataaaggacatctctctgtcagtcaaaactgctgcatacatcacacgtgatctagaaacactgtcctccttccggggtgcttagtgcagacattggtgggattgttttaatgtttgtattgtttataagaaaatgcctgtgggctggagagatggctcagtggttgggagtgctggctgctcttccagatccgggttcaagtcccagcacccacatggcaggtcacaactgtctgtaactccatttccaggggatctgacacctttacaataatgcacataaataaagttaaataaattataaaaaaaaaaagaaaatgcctgcaagccaggtgtggcagaacatgcttttaatcccagcactctggaggcagaggcaggtaggtctctgagttcaaggccagcctggtcttcagactgagttccaggacagctagaaaacatttgagaaactgtctcaaaaaataaatacttttttaaaatgcctgccagtgggtactttatttacttaaaaaaaaagagagaggtttatttggctcacgattctgatagctggaaggttggatgggagcatctggggatttatcaccgtgtaacaccacgagaaaggagaggaagtaagattcaagggagatgcagtctcactgctgtatgtcaagccacttcctcaagagcttgtcctctcctaagacctctgacccacttcaaaagaccactaaacccttcccaaagagggccatgacccagtcccatcccacaagccacacctctcaaaggtctcaccacctctcaataccacaacaggagatgacaaatcacatctacaccatagcagtttccaataagtacctgatcaattaactcagtgctctagaaaaccaagtaattagcatttattgagtcactatctcccatgttatttttgttcagcgcacttttgcctatgttctatcatttcatattaaacaacacagaggagaattatgaatgctgtaaggacaagaaaaaaaaaaaaaaaaaaatatatatatatatatatatatatatatataatatatatatattatatataatcagggctcatcagggttcagtagtctgccatagtacacctgccagcatttcatgtgttccagtttgcttttttgctacttagatacaatgctgatcaaagcaacttggagagaaaatgatttatttggcttacaggttatgtagcccatcatcaagggaagccacggcaggaacttaaagcaggaaccactgcttactgagttgtttcctctggttttctgggcgacttttcttatacagcccaggcccacctgcctagggatggcaaagcccacagtgggctgggccctcctatatcaattagcagttaagaacctcccccagacatgtccacgtgctaatctgatggaagcagttcctaggttgaaattccctctttcccaagtgtcaagttgacaaaaaactagccagcacatggtggaactggatttgaattcatgtcttctccctctacagtccatgctgtatggcacctgtatcctgtcacttctataatgctgatcacagggaaaacataatggtgatgatgataatgaggtcatttgtgtgtgtgtgtcccagtatcaccccttctactaaagataaaaatcacatttgtcatttttaattcttctttctctcactagcctgttaagaaattttgcccgctatacatgcaaaacattttcaggacaatcaccccacatcttctccccatgcctagtctacctactctcccaactcaggtcgtttcaatagcttcaaatagtctctcagattttttgcccttcccttcataaacctagaagccacatttattctttgcttcccctaggatgatttatcttagataaatccatcaacataaggggctggagagatggttcaatggtttagagcacttattcttgcagaggacctgagttcagttccagaatccacattgttagtactcaggcatctgtactggctgacccttggggttctgacaggatatgccctcagctgcaaccattgcctgtgcacattaactacattcccatttaaagggccctgcccacctcccccctgcctccctccttccttttcttcctgcctctctgcccccccaccaccacacctctcttgtctcttctgttgctcctatccccaaaggcaagtctccccctctcttccttccttttcccattccctttcccctaataaaaaacccctccatgtgagcatctttctcctctagagccactgtaggggacaacttaaccagcttgctaggggctggctacaggtatgcctgaccacccttcgagggcgtggtcagggtgacatagggaaggtttaagagtgaggtgcgctcacatgggcccccttcttccgtttcatcttcagcttgctgtactaacacctgccctgccagctagctaggtcgctctgtaagtaaggcttttccctaataaatacccttatatttttacctgattccgtgttgataatttcccacattaagccactttttaaattgcaacacatacgatggctcaccatgtgtaactccagttccaaaggatcctatgccctcttctgacctctgcagacaccaggcatacatgtggtggacacacatatctgcaagcaaaacatttatgcacacaaaataaataaatcttttaaacatgtaaaaaattattgatatacatctaattatgtcactcttcagttcagtgactttctaaagagctttctaattcatcgccatcaaagccaaagtccttccaatgggggttgggggtgcaggctcctgcagagtcagacctccctgggcttctcctgtgttcctctgctgaacctgatttgcatcttgctcccacctcaaggaagcccttccactcccatttccttctgccgaggacattcctccctacttgcccacagacctccctccatacaacagcattgctggcacatactcattgtacaaagtcacgggttttataatgacatttttatccaagtacatcatgaactctgaccatttcaccccatcaccctttcctgtcctacctcccgctaattgccttctcttcccaaatagtccacagcctacttttgtgtcatatatatgaatatagataaataagatttgaatatgtaagactatatttaatatagattccaagtataagagaaaatgtgacatttagctttccgggtttggcttattccacttagctcgacaatctccagttccatccattttcctgcagatgacataatttctttcttcctgtggctgaattatatctataccatattttctttactcattcatctgctgatgagaactatcccagttagcataattgtcaacctgacccagcctaaagtcatctgagagaagagactcaatcaagaaattgccatactgacctgtggatatatctgtcttagtcaggatcctatcgctgtgcatagacaccatgatcatggcagctcttataactgaaagcatttagtgggtctcacttatagtttcagaggtttagcccattatcagcatggcaggaaaaatggtggcaaactgacagacgtggtgctggagaaggagcagagagttgtacatatggatccacaggcaacaggaagagagagaccctgggcctggcttgggcatttgaaacccaaagcccacccccagtgacacacctcctccaaaaaagccacacttcttaatccctgtcaaatagtaccactccctaataaccaagcattcaaatatatgagcctatgggggccattcttattgaaaccaccacaatatctgtggagagacggtcttgattattaactgacatgagtgcccagcccaccatgggcagcaccattccctgggcagatggccctgggctgtgtaagaaatctagctgagcctaaggctgcttacagacatcaggcagcatgcctctgtgcattctgctgttcccccttggctgagagtgagctcctttaccagagttagtgctttgaggaatagcaagcatgcctgccttcaagttctgtgttgagctcctgctctgatgtccctcagtggtggattatgacctgggagtggaaaccaaataaacactttccttctctgagttgattttggtcagagtttttttttaatttaaattaaaaacaatcttattttacaaatcaatcccagttcccgctccctcttgccctcccatgcctcccaccatccccccatccactccccagggaaggtgagacctcctatgggggatcatcaaagtctgtcacatcattggggcaggtcctaggccctcccccatgtttctaggctgagagactatccctccatgggcaatgggctcccaaagtccattcttgaactagggataaatacttgtaccactgccagaggccccacagactgccctggcccctcaactgacacccaccttcagggggcctggttcagttctatgctggttccccagctgtcagacgacaaaagtgaaactggaacaaaaatctaggctgatctgataacagtattgtggagagtactacaataaacacggatgaagcagagtttgctttaagaaggaagcaggggaaaaaaaatgaagcagatcccatgggtaacaactttgaatttttaaagcattacaaaagaatcctcctcccactccagggactgatcagggtgaggcaggtgaaagaaagagctaattgttctccccaataatgtggaagaacaaagagattctggggaaaggtctgcagcatgccagggtccctgggatcagaagaaaagggagtggggggagaaactcttggaatgacagggtgctaagaagaaaaggcctgccccaattctacagcaagaacaggcaagagattggaggcatcagtagttctcaatgcagagtaaatcactgccaacccccaggtcccacacacagccacatggactaatttgatgaataacactttggggaaacccagacagggaattcttgtttcctagggctaatgcaacaacataccacaaactgaatagcttgtgaataaagccccatgcaaaacccagctctcatctcaaaggaaataagagtttattctggagctgaatgtgagcaactgtgacacagtaatatagattccagttactctgaatagcatgctccaacatggcaacagttccatgaagcttttagaatgacagagtaaaagaaagccataagtcttgtagaccaggctggtctcgaacttacagagatctgcctgcctctgcctcccaagtgctgggactaaaggtgtgcaccaccactgcccggcaaaccagtccagctaattcggacaccccttatctctgcaactgtctgccaaccagaagctcctgatggagatccccattgcctaaattctctttttgcttttgactagcatttcagccttcttgggtccctaactgtgtcccaaagtcagcaggaagtagcatgggaatgaatatgtcacccattttccctggttgaaatgctaaatcagaaggaactcccttacattgggaatgccaatacctctcaatccctgatggggatgctggaaagacagcaattccatgattggaatctccaaaaaagaaaatgggggaatgaagggaccagctccccatttcggcagccataacagtctaaaatgtgtttgcctgactttgccttggtcactaggaggtcagatgcctgcctcatggcaaggaacaaatcagaagttagctggtagtgctatgctttacggctctgggtgtgctttacgggcaagtgtacagaaatgactcacagagcatagcaatcgccctgggagggcctatgggccataacaaccagttgaccaatcaacacagggccagcctggaggcacaccaatcctgagcctgtgtgtacccctagacactccccttacgctgccctataagatctcaatgtcgtggctttgcgccgtctttcctagccatctgccatggtggatggatgaaaggcccaagctaacatggggttagctcgttaaacaactacaataaagccttgtgctgtttgcatcaaaaaaaaaaaaaagaaagccgtaagacaagatactttaaagatatgccaatagaaatgccaggtgtgttggtaacagcaaagtgaggaaattcctgcctaagtctgcgatgctatcggatgacattcttaactttgaacttagggaaagctaatggttcattaatgtatagttagtgtataggccaaaaggactttcctgagagtcacaagaagggtaaggcagatgaggaggcaggcaatgaattgtcacacaagaatttggctccaggtctgcaatagttcaactctccaccaccatcatggaagtcctaatcattcaaccataaatctccagaaaccttggcttacataagtttgctgtcccactgcagtatgagaagaaggtgtttgtgtatttgaggttctctgaaagcaggaacaagaacctggtgtgtgcctctctcctttctcttgtttgtggcattacctggtgtttcttggctgatagatgcactatccactccctgcctttaccttcctatgcagagtactcactctgagtcctctgtgtctaaactgcccagaaataaaagccaaaaataaaaatcatcaaggtctacacaggtgaatgaaataagaacatgattgctccaaagtatggttgaggcagaaggttttattgtagatataaggaaaagaacagccagtccagagcagggagagagaggaatagagtaaacatggccagcagactgaaccagccatggggtggggaggggcagctggagaggagaaaaagagggggaggacaagagagagagagaaccatggctgaaatggcgggtctttataggaatcagaagccagggaagggaagggagaaggaagggaagcccctgggcagcatgagaagagatgagaggagccaggactctgtaaggggactttccatacagagagaacttggagggcagcaggagctttcatgagctaataattccacagttggccatttggcccatttcttttgtacctgacaatagatttaatccagatgggggtcttagcactgagagagtatgtggacaaaggctcccagccccaaccaacaatctatccacaattgatactgactggcaaaggaaaaatcagttctctccagtgacatctcactgactatgttaaccacatttcagggtaggccccatgcccaggagtagttggccaacacaaaacaaactcagttgtatttttgtactttttgctttattgggacatttattatcttattggtcttttgcttgtatatatgtgtttttcctttttatgaatgtatttgttttcttttaagagagaaagaaaaagaatataaagttcgaaggatagggaggtggggaggattggggagggattgtaagacaaaaaaagatcaaaatatattgtctagggggaaaaactctataaatggaataaaaaaggtaaaaaaaaaaaaactaaaaggtcaaaaatcaaaatcaaaatcccttaccccaacaatcagacaccagagcctggagcctaccctggcttgggatgtcttcaacaaataacttcaacctgactcctcaagagccctggtacctcacccatacagctggtcttgggaaaatgattggtgtgatgtaaaattactactcaataagacagtgagctgccaacctacaacctctcccaatgtaatgccacacaaacaacctaaggcaaggccagataactcctccagactgtcataaaaaggggccattccccattaggggtgcaatttgttctctctccttctccctgtctccttccccatctccctccccactttctctttctctcctctccctccctcccttcccctccatgtttctatccacagtgtatattccttattaaaacattcatatcagttctggtccagtgactactactactactactactacacacacacacacacacacacacacacacacacacacacacacacacacaaacacacacacacacacacacacacacacacacacacacacacacacacacacacaacacacacacacacacacacacacacacacacacatgccttggactcatgactactggcatgatatagatctgctttttataaggacaccattcatgctggttcagatcccattctgatcacttcattggaacttaaatcctttttataaggtccctatctccaagtgcaatcactctgacattctgcatgtgacactttctcaaagacagactttggaaggaatgctcccacagaatcttatgttggacaaggccataaatactctgaggggcagataaactccaggtgggagcctgacgttatattcattggctctcggtgaaactgcaaggaggactttggagcccgaaagagaaacctaaaatttcttccctgtgtttttaaatttccaaagcagctgcagaaactgccagagcccaagggagacagacttgcctggactcaaggtaagatttctgggcactttgtcacagggtcttgacagaacttagacactatcaaaaggaacccaagacctagacaagccctggaaagatccagtagtcaggggtcttctgtagacagtgcacaggagcatggtgggagctcacaacaacccaaccttggagattattgctgctcagtcacctggcaggctgctgaagagtcagaacaggttcctgaagctgtttccctctgcctgagcaaagcaatcccaggaaagaaggctggacatggggggagacactttctggctgacctctgcctaagtccatctgttaaatgcatcgtggttggttttttttaggactcatccaagaacaatctcttttgttcacacattttcctatcaggtcctctggagcacagcccagggcttagctatctatctgtgtcaattgccatgcctataataatactgctcttcacacactaaacaactaggaaccttctctggaaaaaaaaagtggtggaggggggatggatagagctaacctagtcttcctatggcatggaacagagagtagattcagcacagcatttattttgaaagagagacaggcagatgttccatccatttatacctcagtttcaggctagggctgcagctccattagcggaatgtctgcctaggatacacacactctcagctccatatgaactggtcatggtagtgcatgactataaacccaacacttgggagatggaggcaggaggatccttagctacgtaccaagttcaaggatggcctgagcttcatgagaccctgtctcaaaaacaaacctcagcttcagcattttctgcatgactatgttcaggctagctaacttctctaacactcaggtcatctgcaaaatatccatagtattagtacgtggctggaggaactgcttcatctctaggactgtgagacataagcatctatggtttctatagttgttgctatctgccacctccctggaaaacctggggttcctgggaaaaggcaaggaatgctaaaagtttaaggagaagtggagcatggtgcttgacacagtgtgttcccaaagctgaacattcatggtttgtgtcacccgacaggcacagaagttaaaatatagctttatggaaataatcctgggtcccaaattcatttctgtgagctatgcaattagtcaccccccccagagcttttgtccccgtgggacttagtggagagatatgggatatggagatgagggagacatcatgaggacatccttagctgtcaggtctcagaccaatgacaggtgtttctcttgtccatttcttattgggtgctgagaactgaatccagggcctcctacgcactgatcagtgctctgtttcattttcaaacctttttgctcttatgtaattttaattttgagacagagtttcattaaataacccaaattgtcttgaaattactctgcctctgactccagagaagctagtatcatgggcctatacagaccctacttgacaggcgttttgttgatgctgtcattgtctttaagacagggcctcatgtatcccagattggcctagtatcactatgtggcagaggatgaccttgaatttctgaatctcctattttcccctctcaagtgttgggaccctaagcatatgctatcacacccagattctttggtactgagggtagaacccaggatttcatgcgtgtttggtaagaactctattaaccagggagtctttctgtgctactgggggcctcaaactttgccagcatcagagtcatctaggcggcacagtagaagacaaactgaaagtgtctggaagtgaactgagattttaccaagtgatactcacactgctgacctagagaccacactttaaagatccatttcatttagtattggaaataaaatagcttacagtctatgggtggcagatctcagacagagggtagcctttctgttagggatggcttctacccttcagcaatgggcaagctaagagtgctttcctgtgctggaagtgaaatcaccaaggaaagtgttatctctatccacctttcacagacaagaaacagagctaatgctcttacacctgcaggtcataaaaacaaactgagaatctgtccagagctgtctgacctctggactctgttgctgccttgcctgtgggttcatcatcaggatggttagtagtgaatagtgccagtccatcagccagcactagagtcaagttgatgtcagctttttgggtattttcctccctctggtacctgctggctggtaccataccatgaagcactagaatggatttactttgtatttgccatttaaagaggccagaaagcttccatttgcatatttctagaatatagttcatattatttttgccgtagcatttgacatcctgccagcaaggagtgtacaattaatctgctataagattagatgtaagtgaatgttgacaggtgagttttttcctcatctaaatgggaaatatttctaccacgtctttactgtgctaaggaggctgcctgcctcctgccacacatccttcctcatcagcacaggaaaattaagacatcctccagctctacctcatcagaggtcaactcagaaccacaatcagcttgttctcttccagcagccccaaacactggaagatggaaaccatgtaagggtttccgactccccagtaccctataatagcagttgaaatatagttgaacacaagccaacaaagtgtccacatggttcagttctcagcacccacatggcagctcacaaccatctataatccctgttccagaagatctgacaccctcttctgccaggagccatggcacaggtaaccttagacctgtgaagagaattgggctgcttcggagaatctcttgtaaaaggatgccagcattttaggaataacccattgtgttaaaagaatggctgccttcagcttcctgataagagaagccaggcttgcacaaatagaggttggcaaacaggcttaaacaaatagttgttttataaatgggctcacaaaagtgttaggaaagaagctcttggaaaatagctgttaacaaagaaggtcaggttattctaccacccttcctcctgcaacctcttcaccttactaacaacctgctctatttacacctctccacttgcccgcccctcctttatcctgtatacccccaaggactcatgtaccaggcaataacctcttcctgccccaccaagtctttcctgcttcacctgttatataaggtctctgagaaaaataaaattttgcagcttgatcagaaagcctatcttgctgtctgtttttcatgtctctttgacccatcattccaggtactctggtgctgtggcacattgggatgtgagctcacgtggtgccccgctggcccagggcactcttctagcctctttaggctccaggcacactcatggcttgcagacatacatgaaggcaaaacccatacacataaataattaaattaaaaatttgttagagaactagattttcaagtaggctcaaatcatttgaatattgtattcccagaacatggacttccagggaacggagacacttaccttgtgcattttggggcttgcatttttgtgaagacaatgacagacttaaggaggggttagatggattgttgatttatcagtgaaaattgtgtcttgtgtgttttgtagcagttctacatcatgatcaaacaggagactgtttctgctgttactgtcccaggtaatggccatgtcatccagcctacacatactgtggcctctggaagccaagagaagcctttggaaatggccacttaccaggcatcagcaactgtgcaccagtacaatacagggaatacgaacttacagggcccacacattgtgatccagaatccagctagaatgacaggcctgcaggtccaacccactgtgctacagtatccagtgagaatggctggtgtgcagcctccaccaggagtgatccagtactcaccagaaataacaagtgtccaggtcctacctggagaccctcagaatcccctgaacactgtcccggggccaacacagacctcaagcaatccccagtggaatatgtcctttatatcctttcctgaatttgatcccaagaaattcataaatgaagaggtcagaacattgggggtgagtacaatgtcatctctccaactttgtaagcccatttctggtgcctctgggcaaaggagggtagcagcttctaaaggctaggtctgggacaagcccacaaatggcagtcccaccctgtattcctctgctcccagttcattctataggctcttaggaaggctataaaatggaccagctatcctttcctagttatcagggtgagggtcaatggcagtttcactagaaagacctttgacgggggcgagtggcgaaggcttcttagaccctagcagctgcctctctatcataagatctagtaagctcctctagatcccacgagctctgaggttgctgacttcctcttccaccaagggttttcctgcctctttcctgcatcctctagtatcacttgacactttgaaaagctcaactttgttctattttttgagaccagtcctatgctccactagatgccagccaactcctagcaaaatgactggctcacgggatgactggcttatagcaaattcaccatctcaatgcactcgctcacccagcatggaggacactctatgaggagaccgattcagagatgaccaacacatggtcctcaaagaccaggggtgggggagtgggtatttcgttatagctattgtaacttggcaatatccacgaagatatatgcacagctttgctgctcaaagagtgcaggtgacctagcttcatttgagaggtcacaaccctcctagaggtgagaagacaaggtcaggttcaagaaagagacagactcatcaaaaccctactctaacagggatacggctaggctatgcctggcaaggcttcatatatgtcagaagctttgtctccagtatggtgatgttgaggggtgccagagagcctctgagaggtagggcctagtgggaagtgtatgtcactgggctagtccttgtagaatcttgctagctctcatgggagcaagactggccccaacccctctggcattctgtctcactgtataatctccccctcttgcctgtactctcatcatgatactatttaccatgcagtgacacaatcaggagtgtcctcaccagagccagccttatacagcttaaactgacagtcccaaactgtgagctaaatagacttttttttttcaaattacccagcatttggtatcccatttggactaatacataccccaacccctccctcctagtctatctgcagaaatagattagattgggccaagaacagaaagcactgtttgtagccccaatttaacagagccacctcttgggctaaagtctgcaaaactgtatcaggaattcaaatgcctatcccaaggaccaagggagatttttaattgtatgtgtgaaggtgatgtggtaatgttacattagcactgtaattctgtattgttttttatcctgttattaataccagtgagatgtgtataattggtagccaactatgtgaaggcatttggaaatccaagttcaaaaaacaaactgctctaaacctttctgttacccaaggtaccactggtaccacctgtggaaccttaaaacacacctagaacagacttcaacaggagcagtctagtctagatgttggtctaagtgaaccccaataccagtgatacctcaggtggctctggagcatagccacggtggtaaaggacagcccagcagccctcagcccagctccactcttgtgggaagctgtctttgcgaggctatagtcggagctagctgacttgcccagggttcgtccctgagaaggagggtgtggactaagaaaggctagctaaaagagttaaggaaaagatggagagacaggatagatctcaggaggacaattcttcaacattcttaagtatccaaccaaaagtggggacaatggcagaagacttctattaccatgtataaggggcaaacaaacttacttcccttaatcctccaggcatttggtaggcacacctgccatctggccttcagggtcagataaacacacctgagcccaagtctgttgttattcagataaagacatcgctaccaaggctgaaacatcctgcagtagccaagctataaacttataaggacagttttgaactctctgatcttgaggcaagacaaaatggacccctctttataggccctgacacactctctcaccagtttgttctctgctctccccacagggcatccagatcctcattggcatgttttatatcgtctctgcagtcaaccctcaactatactggaaccttcctctggtggggatatcagggcacctggtctggggaggattgtctgtgagtacaaggccatgtggccttctttctaaggtcagagaggaaggggggacacggggggcgggggggtgtaaaaagactcttgaaccctactcccagtcatgtaacccttatagcttcaaagtctgtgggctctgctgaggtctgaagagcccacctacatcctggcaacaccacctcctgcctataaggaggttttggctgcaaacatcagtttttagggtcagtgacacctcctccaaacccacctttggtgtttaagtatacgataaggactacacataactaagtagttatggtcaagatgtggtcctagtcatcactgacccatcattatctcagctccagtctgtcctgctaacctgacaggttagcaaggcaagctcttcttctggctaacaccaagctttagcctttctcttcctccagcttagagtaaccttaatccctggtatacattgtcttaatgcggtaatatatgtaagtcagagtccacagagttccatgctgtacacagcatttgactcacactcctaagaacaactgcaaaattttcaagagtcaattaagcaagtcatgcaaccatttggtgataggaaactggctattgcagataaacagccatgatcagggccttcccctgagtgtggagacctcaccagcaggtggcagacatttgcaagtgctgcactgtgtgtatgaaagccaggggaataggagaaaggttcagaaagacagagactgtctcctgaggggcttacttgggagttagggtacaggtcactcagggccatgccaaattccccctaggtcagtgacttcttacctagcaaacttggctgaagttcacaggcaatgaaggatgaatttaagtggagttttattagagaaagacttttttaaagtgaagccttcaaggccaggaaaagtaagaggtactttcaacaacaggaaaagcccagtgagctgccggtctaggggctttcacacggcagaaaccggatgaagactggggtcttgcctgctgagatgggttaatattctgagcttatcaaggggcaggctaattgggatcttggaatatttttctgacatatacaggcagctgcgtcactgaaaagcccatgcctacatgattgatgactcccaaaaaccacatcccctgacctacttgcaaaacttgtaggtactccactaaagagatttttctcccccagcaagtggctttaaaatttttttcccacacaatatgtttttatcatggttttcccttcccccaacttctccaagaccctccctgaaagaccccccccaggggtgggatcccagggcgaacacttgggaatgaggcaaccccagtcaccaggcagaggcgaggacttgatgcaaacaacaagaggcttcattagtaactggcgctgggacccaactcgttactcactcaggagcagaggagctggactccgagctcaagcttgagtctaggggcttcttaaaggcaaaaactgcaaacagatggggtctagggtgggcaagggtaacagttctgattggctcgttccatttgtcagggtggaattcctcaaccttaaggtcataagttcagattcttaggtagctgcaaagaaaacatcttaggctggagtccttcaattgagggccacaaattacagagttttcatggttacttactcagtaactacacatttcaagggagatacatttgactgagataagacagggcatgggccttcagggttacagagtcacagagtctgtcagttaccccccaggctggggaatctttatgaccagcaattagcaaaggaatgttaacaggagtggtggacagttacctctccttctctgagagcaggggatcaggctccagttgtggcactcctgatttaaggagttaaattttcctttatcgttagaggttccctaagttcttaaacttttattaatttgaatttttggtccttcatcccccctccctacccactcaactctcaactccataatgctctctacatttgtaagacccccagaagctcaggcctccaggatctcggcccaggaccacggtcaccccaatcaccaggtggatttgaaagcttgatgcaaactgcatgaggctttattaaagtttttaacgagctaaccccatgttagctcaggtctttcacccatccgccatggtggatggctagaaaagacccctcgaagggtctgcatagagatcttatagggcagtgtaaggggagtgtctaggggtagcacaggctcaggattggtgtgcctccaggcttggagggcttcccctgtgttgattggtcaactggttgttatggcccataggctctccagggtagttgctattctctgtgtgtcattgctgtgcacttgtccgaaaagcacacccagagccgtaaagcatagcaccaataacttctgattggttccttgccacaaggcaggcatctgacctcttagtgaccaaggcaaggtcagacaagcacgtgttcagctgttatggctgccgaaatggggagctggtcccttcacattcactcactcttttcccccttctctctctctctcaaaaaaaaaaaaatcattaaaaaatgaacatcaagctgggcgttggtggcgcacgcctttagtcccagcacttgggaggcagaggcaggtggatctctgtgagttcgaggccagcctggtctctagagtgagtgccaggataggctccaaagctacacagagaaaccctgtctcaaaccaaaaagaaaaaaaatgaaatcaaaacaagcaagcaaacaaacaaaaaagacaaaatatactaaaaggaaacacaaaggctcccaccaaaaaaaaaaaaaaaaaaaaaaaagtttgtttgtttgactcctgggcatagggactcctgtgtggttgatatacccagtgagactccactgtagaaaaccaattgtccctttgccagcaggtatcaattgcaaatagtttttttgttaggggtgagacccctgtccactccccctcctcagtgcttcgatccccactgccttgaacctgtgttggtcctgagtgctgcccagtttctgcaagttcttctgtttaccagtcctgttgtacctggaggacactgtttccttggagccacccaccccctccagctcttaaaattcttctgcctcctcttccacaaagatccctgagccttgaaaggaggaggactttgatgatccccacttatgactgagtgctccagagagtctctcactctctgcacactgtccagtttggatctctatgttaacttctatctactgcaggaaaagacttctctgaggaggactaattgaggctctgatctatgggtttagcagtatgtcattcagagtccttttattgctgttttcctttaacagaataatagtagtagatttccccttaggcccacggcctatctagtctgtttcttcccccacccctacccccaccctccccttcaaccccacccctgcaattgttaactgctaagcttttcagaccttgtgtttttctgagcttcctgagctattgacacccacacatatacacacatgaatcaatgtgatattttttaatttgtatgttgttttggattattccctaatcatttttccttgcttgtatgaatatgtttttgaagcacatcctcaaactgtttgttggtggtttatgactatgcagttgactttttttttttaagacagggtctcactagttagcaggccctggctaacatgcaattcactataaaccaggctggccatgaactaacagagattggcctgccttggcaccaccaccccagctgaacaattgacatctgcaccttgatcttctatctggtgaaataactatactttctctctctctctctcttttttttctttttttggtgggagcctttgtgtttcctttaagcattttttgtcttttttgttttttgcttgcttgttttgatgttcttttttgttgttgttttgttttttgttttttgagacagggtttctctgtgtagctttggagcctatcctggcactcactccgtagaccaggctggcgttgaactcacagagatccgcctgcctctgcctcccgagtgctgggattaaagacatgcaccaccaatgcctggctaactgtactttcttattaattctagtgactttcagatctgctggaatttctgtgtagcgtctcatgtcatctactagcaaagacactgttagagcatataacagttttacttcattctcttgtcctatcacactggttttgtggcccctcctgagttcttggatttcagctaagtgttaggattcagttccccaaactcaatgatctacagggacccttttttttttttaagatttcagaccattgaattcagttgtcccttctgtacaagggtagtagtacactttggcatttagaagtgtttcatctcagtgatccctaaagaagacaatgtaggactgggatgtggccagtggtaaagttatttgccgagcacatccaaggccctgggctctatcctcaatagtacaaaataatgtgagtagcaactgttgttactgcaaaagtcatttttacagatgagagggaaagagcttcaacagtaattcacagaactgatcaactgtgtgaaaacaggggccttgttaggtctcttaggctggtctaggagcacaacaagatgaattagtagaagatatgaaacaggagcctcattgtcctctttcccaacctcaggacaatgactactatgcaacactgcccctaacttccagaataaaatcatattcaaagacaggacaatgtcagcagtaaattagtttggacaatggtgtggcccaccatgcacttgaggagacctagtgagacaatgatgataatgaatgacttagggcatcttacatgaccttcccaaattgagtgccacaatactgagtacctaaagtttgggacagtgataatgtcaagaagctcacagatgtacatgcatgggaaacaagacgtttggaatttaaagagacattcttttttatgtctatgtagtttatcatctctgggtccctctcaatttcggctgaaaagtctgccagcagttgcatggtaagtcatgacgtcatttctttgatgacccttgagtcttaaagaggtatagttggccctaaggaccattaatttgactaaattaatcctttattttacataattggccatgaaatttaaagtgcagggccccactattaatccagtctgtttcacaacctcagtttttacgatggaaactccctgttcttggcaactagggagcctggcctcagaacatgcatagaactgtaaactctccattcctatctcaaaagataaatccccacatctttctccaatacaatcagacacttaaagagagcatcagtgagcaatggtcaagatggaatatgagttgctgatttgtagtcactctagctatcacctctcctatgtctgtctttctccttggttcccaggtctgggccgaagggtggtggggtttgggccatgaccctgtactgatatacacaagacttaggagaaggcaaagaggcagagagtgcaaggaccagggcccaatgaaaccctaattttgaagggtctattctctgaagatagtccatttgacatcatcattagtggcttctgcttttttgacctgggtgtggtggattcctagtataatgtcagttacctccatggccatagaagtgaaaagaataagtgtgtagggtctttctaagctggttccagcacccctttggctgtctgtttgacccagacagtatcactgggcttgaaaaggggaaggtgttggtggacttggaggtcagctggatctctcagatagtacaatgaatagcctttatgaatgactggaagccctgtagtgacttgagaaaggaatgattagagagttcttccaactgctgttctctgagctggggaagcagttgggaaagtcttccaaacatagtctcatagggggtgaatccctccccatatgtggtgcagtgagcccaaaacccaaaacaaaaccaaggaaataggtctatatacccctcaatggactataatgagggtttggttagggtttcggttgtttttttaatgtcctgttcattcatttaatgtcctgcccagaattatggggtttataggcccaatgacatttccaaactgtgcctaaagctttaggtattaattaagagattttggtaaagaaagtcaggccattttcagacctcattgctagagagaagccaaattggaggaccagttcctaggggagctttttagctactatttgagcagttttagtctaggtgaggaatacttctacctacctggaaaagatgtgtataaaaactagcatgtaggcagagtcaatgagacaccatgtagctgccaaggaagcaagagatccaggcatcaccagtaagccaagagcacatggagatacacagattaatagaaatgggttaataattaagagagagatagtcactaagaagcctgagccattggccaaacagtttataattaatataagtctttgtgtgcttgtttgggagtaaacggctgttgactgggacagaaagaaacttctgtttacaccaatgggtggttcctgtcctgaagaaacacagcatgaacaatcattatctcactgccctggggtaaactaacagatttctgcccccaaccatcctgaccctctcctttctgccctgctcctcttttgtcctatgtccagagtcttcccaaatgctgagctttgacctttgctcaccattcccttcctttatgtccttcaggtgaacgccagcatcggcatgaatatcgtcagttccatcttctcccttgttggtatcatccttatcattatagatctggttattttcaactctaatttttcttcgctgacggtgagcattacaactgactcgtcccaaagcttctttaggatcaggaaagtttgcacggctgtttattgagtaggaaggaattgcaacagaattccaaactaatatgatccataaattgcataatctcctccaaagccctgcaactgctaagacaaccacagtgttcctcacaccacaatgaggactctttgagattaagaggcaaattgtctcgggtggatatatggttgcttgtctcaagctgcaacctggtcctccttcaggattaatcaagcagaccaaggaaaactgacagagcaagagaaccatctatagtggtgagcacagtcctcaaaaggagagcttccctgtaggaggtcccagaagaagcccagtccaacttgacagggcatgggcgggaaaccatgcaagctggttggcatctggagtccagccctaggcaacaggatgaactgacaaagaagtagattgtgctcctgtagaacagaaatttagaattccaatagagaccaaaccctggggtcccatcttctgctgaaggggaagagtgaggaggacaagtactcctagaaccctgcctccacaatacactatgggtagggctacagcaggaagcacactgagctcagtcctgctttcaaagctctgattcaggcaagaccagagactgaactaagacatccagaagccaagcagagctgacggtcctggcctcactggtacatcaccaactcacagtaaggaccccagcccctcatatgggttcacagccatggtacttgttaggtacatcacaggtagaggtaatttcagaagcaaactttaagacaagtagctttagtagagagaggaagtaagcatgacctcaggccagagaatcaccaaccctactagccatcaatggaaaactgctctgcagagggttgtttgagcttcaggcttttggtataaacagtaacatgggcttctgaagccataaaagtcacaataaaggaatgcagtgtctaacaggtgggagttgaggtgtactgaaaatacaatgtaaaggcagcatctatgccaagacaccacacacagaggcttctccaggattccagatgaggcatatggcatttcctttaggagagctgcaaatacagactgccatccagtcaaccatgaagcctgaaatgcccccatttcctccctgcccctagggttgtttgaaggcaatcattgggggtctcctccccttcgccctgctggaattcatcatcacctgtgtggtctcacattttgggtgccaggctacctgctggacccattttgaggtgagtattgggctttattccatgaatcagagcctactctggggaggtttagcaaaagacgactaagagtctgagaaaagcgaggactgaaagggtgtatcagataagttttgctgcataacaaaccacccccaaaccaagtaccttaaaccactaagcatttccttaagcagttctcaacctgtgggtgggtcatggcccctgtgggggtcatatatcagatatttacattacagttcttaatggtagcaaaattacagttatgaagtagcaacaaaataattttatggttgggggtcaccacaacacaaggaactgtattaaaggtcacatcattaggttgagaaccactgattcacttagttcttggttctgagtatcatccatttgtacggtgatacgtgacttgctcgtcaattgatctcagatggactccctctttaatctgctgcccaatgggcttcaggaaggctggtgttcaggtctcttagtgtaccagctcatctcagctcctaagttacctcatcctccagtatgctagcttgagtttcttcacaaggcagctggattccagcacagcaagacatgtaatccctcacaggcaagcactctagtccttgcttgtactctgcttactgatgtcccatgaccaaagtcattcaggtggccaaactttaagtctatgagcagaggaacagctctggctctggggagaaaagctacaaagtcacctaagaggcataaataggaggacttgggggagggggtattttttcaatcaagttattaacgcttctttaaaaaaaaaaaaaagcaaaccatgtttatccccatccaaggaatcccaagcatcccacccaaatctatcaccatgcttgaagtccagggtcctgttttggaatatggattttcttgacacagcaacctggaaaccaaaaacaactttggggctgaaaatgcaggctgagagtttggttggcatacaggaagtcctggatttgacctccagcattgcatgaaccaagcatagtagtgtatgcctgtaataccagaactagggaggtagaggcaggagaatcagaagttcagtgtcatccttggctacttagcaagtttgaggccaacctggactatgtgagactctgtctcaaagaaatgacaataacaataaacaagttccattaacttacacaatggggtctagtgagacaagaaccagataaatacactctcccattcaatagagaaagaccttataagaggcccaggacagtcaaggctccatgaaattctaaaatactgtggagcagtctagagacatggctcagtggttaaaagcactcactggtcttctggaggacccaggttcaattcccagcacccacatggcagtttacaactgtctgtaactccagttccaggggatctggtgccctcttctgcactctgcagggcaccaggcacatgcctagtgtacattcatacaagcagacaaaacacccatacacacaaaatattttttaatttaatcctaagaagctcatattgcttggttaggaatcagttcagccttgaggaagaacctgtcattattttgtactgcttcctggatgtgtgtgtctcccactgttctctgggtctcttggctctactatcaacaacacttttcctttctcataagaaggagcccatcttttccatctttggaaagatgggcaattatctaatcatgtttgcactttgagtaacatcaattcaaatttagtggtctttttgctactacaagtccctcaaaatctctggggatgttttatgtaccagatgatggcttttgcaacttgacaaaagtctcattttagctgtgttctagacagacctctctcaaaatctaccaacaactattttgggatcaggcctctccagaaccaagcccataagatttttagaagcttttcagtgtatccaaggggcctcactaaaggctggagacatggttcagtcagtaaagtgctggctgtacaagcatgaggacctgaattcagatcctccagcactcataccaaaaggcagactctgtagcatatgtccataatcccagcactagggggcagggaaggtggggcaaaggcaggtagatggagctcaccggccagccaatctaaccaatcactgagctccagtgattcagtaagagaccctgtctcaaaaattaaagtggagagcagctgaggaaggcacagtgtcagtctctggcctccatacacatgtgtatacacagtcacatgtgtccccatgtacttgtgcacacacacacacacacacacacacacacacacacacacacacacacacgtgaacacatacacagtctaacttagcaccgagttgtgcagacacagtcctgtctgtgtgggtctaaccctaatttgacatttgttgttagtcctaaaatttgctattaatatcatttatcattgataacttcagaagtacagccctaagatgtaatagctcacacaacagacatttagctcatgatcctctggccttgcagacagttctgatctgctgacagttggttgctgagatacccaatggttgtgtggtcttggagagacacacacatatgtgtctggcagttggcaaactctggctgtgaacagggaaaaaaaacctcactattcatcatgtcagccctgactgctttctgttccaatgagcagcaagaaagatcaagccccagtaggcaaacacttcacacgtctctctttatatcccattactattgtctccttagccaaagaaagtcatgtgaccaagcccagcatccatgagagagggtctaccccaagcatggaaagagaaagggaaagaagttactgcttttcttgaagttcactacagaggacactgatgccttcctgacctttgtctttcagagcatgactgtgatcccacccatgttcagtggcaacacagtcaacacgaccaatggacctgtcaacaccaccagcccagccagtgccaccaacatcccagtccaggccactgttcagcccgccgtccccagtaatgcttcacctgaaaacttatacataaacggagctaatcttgcccagaagtaagattgcccgtttcaatgacacagtagtgccactgcaatggtggctttacttccacatggaacacctgagaccttcaccctggcatcaccaccaggccaaggctaacacccatttccctcctcttcactcttaagctttcctttggtttgttattagtgtgcttttttaattcataaatattttccttttgactctaggtgtctttttactttaacaaactgcatataaggttgcattttctttgttctgctatatgcttactgttgagaagtcaattctaaactagtagacagcccaactatctactagtttaattgccctcctccaactctaatcctgaaaggcaactccccaccacccgaggaacatgggagcagcacagagagtatgaactgcccaaccctgcttggcatgtgtccccagcacttctgagtgtgtgggtgagacagccagtggacaccatattgcctgctggaactgtaacaggcaagccacccaagcccaagaaaagggctgtctgggttgagcaatggtagagatgcaaatgtaaaaccctcttttacttgtacaaagaggctctgtaacaagacctttcagaccatggtattcccttaacactctctagcctcctcttctgtccttctgtcttttcccagagtccttataatgggcaacatgcacaagtgacaggatccatgttcctggtgccacttaacagcatgaccatggctcctatcagatccacaagactgtttccagctaatctacggagaccaaagaatctttctttcgcgagtgtgaccttggctcctggcactgcctcattaagtgcttatgttcaagcatttctttttatttcacgtgtgtgtgcatatgtgtttgatgtgtacaggggtacatactggctcaagggtgtgtgtgagtgtgcttgtatatgtatgtgcatgcatgtagaggacgatttcagatgtttctcaggcactctcctcttcctcctcttccttgagatgaagtctttttactggcttggaattcaccaagtatactaggctagcaagccaatgaggcctagggatctgcctgtcatacctccccaggcctaggacaaccatcatgtgccatcatgcctgactttttctttttaacatcaactatgggaatcaaatcaggtctttgtgtttgcaaagcaagcactttactaactgtctcttcagccactcaagcatctcctttttgcctgcaataaggaagggtaataagggcaaaaaaaaatgaaaggctcaagaacttccatattgcagcatccactagcctgaagctcccagtggtcattatcagtcaccagagggccctgcaattgtcataacctttaaagatgaggttgttaagtccactcaaatgcagtagtcacagcactaggaagtaaagggcagtgggcagccaacatgtgaacagtgcctctacttcactattcacagagattgaatgtccagcaacaatatagagacatcctcagtccatcactcacaagaggaaagtgagactcagagagaagatgctctgttttgcctgttgctatggcaaacaccatggccaaaagcaagttgggggaggaatgggtttatttcagcttacagatcctggatcatggtccatcactgagggaaatcagggcagggacctggaggtaggaaccatgtaggaatgccatttcctggcttgttccctggctcatatatgccttgctacctttctaatgcatactggagtgtccttcttaggaaatggcactgtccacggtgaactggaccctcctatatcaactaaggcaatccctcacagacatgtttatggtctaacttgacaaaggcaatttttctgctgagactcttttctttccaggtaatcgtaagctatttaagttgacagtttgtaacaggcccccagaccttagcactactgccaccatgatgggagtaccattgggccttggaacccaggacataagcaacatctgtcaaaactagaatgaagacctaacccatcaaagtgcatagttttgggaaaggccctaaatgtactaccttgctttttggcctctgtagttccacttctggctagctgttccttctacctgaggagtattaacataagatgtgggttttgtgctcaaatgctcaccctgagaaaggctcaggagtgcacttgggtcctgaacacacagtgtagtctctggccagctaataaagactttctagtggctcttaagccttatctgagcagtctttggtggatacctcacaatgacttaatgctaactgagacaagagcccttctctttagatgtaaaataggattccctgacacctgggccacagaccagttccttctaccataccacaatagcttgcccggctggccatccaccccgatccccaaatatctccatgtctaccccagggcaggacaagctaacacacactagctgaagagttgtccctgttgaaccagtttggggctgggtcctcaaagtgcatggcataggaatcctctggaggaaagccattatcattccaccagtaagacaaaccacttccaaagcatgccacttaagacttcctctgttcctcgatgtcacttctagtcagaacctgtgcctcaacccacctctctgctcaaagcccctgttcagagcatgcagggagggaaaagtgtggccacatccattcctatgtgcaacaactgtttaccaactgtgtgtccccggtgctagccatgagggtacaaccagcagtggagataaatgggcaaatgctaaactgcagaggtagccattaacacttagctttaggatcacacagtggacagcagtctgaggagcagcataagggcagggaaggtaggaaggaacctctcagggatcaggacaagcagaatgagcacacctctgtgttgcagtagccagtctgctatgtagtatttcccaggaaagcgttagcccagtgtacaagcagaattaacagattcagccatatccaaagacaaagcaaagacaagaaccattcagcaagagagggagatctgactgtactggccaaatcatccaggtcatgggctttgtgacctggaggggaaggtaggtagggctgggcactgggctttctgcctggacattcccacatctccaacttatcctgtccccatagtttgttttgtacaggtggatggggtttaagagggatctaagtcaagacctgtttcccaggctggcctcaaactcccttgtaactgaggatgaccttaaactcctaatcttcctgcctccatctcctaagcactagggtgacagggatgtgccatacctgacgccattcctgttctgaaatttcagggtctggttaggggaaagggaaatacctctcttctctgaagtttccaggatctttcaagacagcagacaataaacacattaacagatgaaaagatatttaaatttattaggagcctgctgtagaatctcacacattcctgcggagaagagctagaagggcaagaaataagtggctgaggctttgatggaagggatgcaatgggctgaggaggggaggagggtgcaggctggacagtggcctcaatgcaggaaaacagataaagtttctctcgggtagtaaaagttgtaggcaatggcttgtgacagcctgtggtgttggccttcagtgagtgtcctgtgacattaatctcccctgcttgatgagatgagggcacaatttacagtggccataaggcctggctaagaatctgtctttagacaatggaacttgaagaacgcctgaggagcaaggtgtaaggcaagagaggtacaaagctgtgctctggagtgtctgtttcctaagccccagacaaagctggggctgctgatattaagagataatcaggctaccccaaagattatctcaagagatttggacacatgggggaagaggcatcaagattaacaggaaaagccagttggcagagactggaaacctccctaccaaggctacagggaaggaacagagtagcaccacgtagcgatggcaaatgtgggaaaggtaggttctacgcaaatgacctatagatggccctgatgctgcagtgcctgacacaccggagactctgagctgtcccctacttccactctcagaaggacttttcttttacttaataactctccctgtctatcgctacccatgtgtccttgacctaactcctcattcagggacgtaagtctagaatcttatcatgtgccctctagactcaaatccatgcccataacagaggcagatcctcttctataccacaaaaaaaaaagacaaaacattcattttgttcccattctactgttgcctgggcatgtctggtctgacctggacttggcagaactatctcatgcatttgtgttcagtgcaaggccaactccatggccttgctgaccatggctgcatggatggggcctcaccagggacaattgggtcatgccgtgtacatcagcctccaacagggaagccagacaccatcagtgctaggtgcagagctctcagtctcctatgtctcaggttggaactgatcactcccacttcctgttggcaaaggaagtcacagggcagcccagttttgaggacttgggagaacaactccaaccctctgaagatgtagacacacattggcctgaggactaaggccagttttacattcaacctgccatgctgatctatcccagggttagctgaggcctgtccccaggatgtcttgagcctttaggtcctacccaatcatgtggctttcccagttgcctcataagatattctgtgagatcctggaccctgaaacacacagactcattttccaagtacttgaagggcaccgtgtatacaaacacacacacatactaacatatgttcacatgaatgttcatgcttagaccctccctctgcctgccataggaaatctgtaagcctccttgcctaactgtggtcaaacctgggaggacagaacacaggcagcctagtcttctcagagcatctcagtggggtgaaggggaaggtgaaagccttatggatcctcatctcagctctgacatagtagtgggtgccaagcaactcagtttcctctctgggccttgatgttccctcccagagactgaagcaaagcaatgggatgctcttgggccctttggaggccagtgaccacacaagcggctgcctctggcccccacctctgggagacaggcggagacctccgagctggcaaggactgagaacctaccagaggtgcagctcccaagcagtaatttccaagccccacaggaatagcaaggttttcacaggataatgtgtgaatgtgggagcgcagaagcagaggggagccagcagcccgcacagcagccgtggcaagccggtgagtacccccattgtccttctaaaaagaccacccagggaagaggtgggtgggggctgtaggggccccccggggatggagagagaaagagatcattgacagaaacctacctggcactaagattgggaaggaaggaagatcccagggctactcagggaaatgagagacccactgcacagtgaaggggggaaaaggagagatatctgtcttctctcctcaaagacagggccagagattactcaggtacctgccagggaccccagggagataatcgccctcctgagagagactcccttactccagaagccaactcatattagaagtccagcctaggcaggtatttccaaaccatgtacaggtgttctctgaggggaggagaagggcatggcaagggtcactgcaaaaaaactcttctgggcaaatactgtgtcatttgcagatgggacacattagtcagggaaaggcagagcatccctgctgcccagtctcagcggaggagcgcacaggtatagcagaaagccatggggtatgtgaaggccaacctgagaaaattactgagaaatatgctctccatctccccccaccccccgtggcatgtttgcatctggtggcatcgcttctgggaccctgggacaggcctgggtgtcctggaaaagctgagattggatacaagattcctggtgccacagggccagtcttggatagatgcaagtttttgcctggcctgagaaatggctgcagacacaggatgtatatatacaggaaaacttagaagcctgaaacacctcacctcactactacacgtccacttctgtgatatgtggggaaacagaggcccagagagatcaggctatttcctcaaattcactcagttacttcatcttttgttttgtttgttttgttttgtttttgaagacgggttttatccttagctttggagcctgtcctggaactcgtgctgtagaccaggctggcctcataatgtgcattcttagcaggctgagcacaggatctgtgtcttaactgctgtgacaaagctgccaaaccccagatatattaccatacatttcattccagaacccccactccttagagtcactccttccagctgccaacacctctcaaaatgtagcttcaacagggaagtaagcaaaactgctcaggacctggatgaaagtcactctcaagacaagggctggctgctggagagtgctccagccagcacactggggcagcccaccactacggtccccctgccactggggctgttaacagctgaagcccaggagtgaaggtctcctccccagcaggcatgaggccggacattgctaggtggtccttattctcttctggagtgttggtggctctgttttgttttgtggttccaatcaagcccaaggtagagtgtgctctgtgaatgctaactctttagaatttggatattgattcttttttatagggtgtgaatcaaatgtttgtgttctatgatgcaaatgggtatctatctctaagtaaaactgtttacattaatttttaaagattcatggcgattatagcagggtgacactttggcagtcctgtggcttttccagtcactctcaggccaaaccgcagcaatttagcaattagccctcctggtcttgtgttgtgtcatgtcacaacctggggctgctcctcagcccaagtcaagcaggtaaggaggatgatggatggctgtcaccttttaccatgccttttcttgctctccgccatcctcccacacacagtaacagactaacagtgacatctccaaggctgggcagtgctaaatgaggacaaaggacaggggccattgcacctgttaggtgctttgtgagttgctgccgccctccctgaggtaggcacttctctaaaagggtgtctctacagagacacacaccattgaaaggatctctctcctgtgtacccctctgcaaaagagccctcacccaacctaggaatccgcaggtccagtggaaagagcctacatgtggctttctcccagccagttcctcaaggaagcctctcccccacagcaaaagacagccaaagacatgtgccctccttcctgtgggtgtcaagtctactttcaaccccacttgcaaccctgggaaaagagtataaaaaccagccaacagcttctcagccacctgccttttgcaagtcccttggcacccttggtgacatcagtcacttcagagtctgctctccaaccaacacatcagccctcaaggcccttgacctgccctacttgcttctgcaaaatggctgcaaaatatcttcttcccagggctgccctggggtctgtaggagagctccttataaactgttaagggctttgcatgaagggctgttactaccgcatctctttcagcataactgacacagttgccctgagtttccaggcagctgttcgcttaaggcagggtgcagtggttttccttcctatgcgtgcgtgagtggtggatatgctggctgattgtgagtaagaaatgggagtgggagcactgaggtggagtcacctggaataccacaggtggattcgtcactggcttcacaggagctggggggaggggagtgtgagaatctcgggatctgtgtcacccattcctgcttgggtttgccacttaccctgcagagggtgcaaagcctatttctgtaggtgtttccttctcctgaggatcacggggctctgtgtttgatcttatttctcaccacccaccggggagagatgttgttaatgacgcaagtgctccatgctgggtggcttgaaccctgtgggagctgagagttcttctgaccccagaaaatgtccccagtacacatgtgactcatcatgggccccaaacatgatcttcacctgtccctggtgaaacgacaactatgaaagctagtatggtcttttagcctaaaattctgcctgttctgactctgtccttagtaatttttaaatgtccttacttagggaagtgctgcagtggctggctcactcaggcccctttggtttataatttgatcacctgaaataccaagggtatctttaataataatggctgtcatgtataggtggatatatatatatatgtgtgtgtgtgtgtgtgtgtgtgtgtgtgtgtgtgtgtgtgtgtatgcacacatgtgtaagtacatatacaagtgtgcacacatacatgtagaggctagggatctgcatggctccatctccccagcactgggagtctaaggatgacaccctgcccaatgtttttctgtctggaacttgggtcctcatggcttgcaactccatccccatcttagtgtcataggacagcagagaagggtcacttcctcctgtttcacagcccagaagaagtcattcacctgggaacccaatcagataaattaacctctgtcttcaggatggctagttattgtgacaatggggaaaggccctccacagtgccctggactggccactgaactcgtagcttagaagttgtgaatttacacatgagtgacaactcatgtggttttaactaaaaaaaaaaaaagtcgcatgttcaccccaaacttcaaggtacacagaatataatagctagaacaattgaacaaataacagagcctgccccctggaggcagcaaggagggacaggtgcaggctgcgacacagacagacttgggcttgaatccttaccctcagattcactaggtgagtcgccttaagcatgtcccttctctgccacaagcctcagtcatcacaccaaaatgataaactgtgggaattatcaggtcactgggaaagtaagaagcactgtatcagaaccatccaaagacaaggtgtcctcaaaaaacagttaacacatgctgttaattaatcccataacctggggcagggtagagctagtgcccctgtgaagagttcaaaaagtttcaaatgtcagtgatgatccagaactgataacaacactactttgaaacgagaacaccacagccctttgcaagtttctaaagacattctggtccattttgatcctcactgccaacctctgagatgaagtgagcagctgtgctagctataacaatgcctggggtgaccggcatctaaagagaacagatttgttcctggatcagcccatgtttagctgcccctgtgttttgagcctgtggagaggtagagcatggtagccagaggatatggctagtaagccaagaagaagtcaagatcccaaaacccctttcaaggacatgccctgacccccagggccaaaggatcctccaccagcctctgtctcttgggtgtccattgtgactcacgtcacaatgtgcctggccttccttttggtcttaggctggtgacactgttttgcaaagttgtggaatctttaagagagggaacctctctggagaaagaggcttgctggggccagggctagagattaacagcccggctctacttcctccccactcagggtttcctcactgcaggtgtatcccaaccagacgccacacgctcctgccaccagtccttccccaatacaacggacagtgttcccttgaactctaagccaaaataaaccctccttgctttaacctgtttatttttcggtatttgctcccagaaataagaaaattaagtaataccaggttctgtcacctgccagtcatatcatccggggaaccaagtttttgtctaacatgcggacctttgagggacactcaagacccaaattctagtcacagccaccacagccatctttgtatagaaatatttggtagctggatgcattttccttcctattccaaaacacagaaattaatgtaaatgacatttaaggcaacaagtaaattccagtgaccatttactatggtccaggcagtgttctgagattggaattggaaaactccagcccaccaatcagacccagcctatctgttcatattaataaagctttattgaaacacagccccacctacttatgcattcattgcttgtttctggttcacagaggcttctcctacttggaacagaaactaccttacaaaagttcaaaatgtttactagctgagtgtctgcagggaatgtttggtggtgctgtcccaagcagtgttcatgtcttctaagaatcatttcagtgtgagggtccagaaactggagccccaactaaatcccaccatgtgggaagtaatagcactattccttgaaatccttgaagatgtcaagtgatttctgtatgggattgtcgttcaataacactatttaccttaaacatgttcttttttgcacgtgtgtgcaagcatgcatatctgtatgtctatatgcacacatatgtacatattaatgcatctgtgtacatgcatgtgtgtgcacatgtgtgtgtgtatgtatgtacgcaagttcgtgcacgtatgtggtggccagaggtccactctggatgtcactctaccttggaggtatagacagctaccttgttttctgagagagactctctgttggtctggagctcaccaagtaggctgggctggcaggccagagaatcccaaggatccaactggctctatctccccagcactgggattacaagtgtgttcccccatgcccagttttttataggagtctctgggattcagactccggtaggtcctcctgcatgtgctgcaagcactttaccgactgagctgtctccccaacccatgaaacagtttattaatcacctccagtgaataggaaatgcttttgctggcagattttacctgtgcctcctctgccattcccgtggaggtactccagccactggaaccctgtttcactccttgtggggactcagctatgcctctcaaaggcagtcccaacagaacctttgcacttcattcaccaatatggatcaggcccatcatagagcaagcaacccagaagacactcctgtggcaagccccatcacccagcatagagatgcacatcactgagttccctcacagagccacagagaatgggctatgccaagagcctgctatttcagaggcacagacacatttgtgttttccatggtgccagaatgtattgactagcagtaaaattacaagccgagtcagtttcatttgctgcaatttgccaagcactcctgattttcccttaatagctggctgttaactctcagatgacacattatacacctgactctgtgtgtgtgtgtgtgtgtgtgtgtgtgtgtgtgtgtgtgtgtgtgtgtgtgttacaggttacagaatgactataaaagtacagagaggccacagcacagttcaaagagtccttaccagaaacagcaagctattagagacacaaaaagttgctgcattagttggatacgatattaaggacccctagctggagagctgaaggcacaggactacagagacacaggaccatggaggagcagtatagggctgttttggtcaaagagacagactggcagtagtttcaggaggctgtatcaaaccgtggagaccaagctgagctgaagtgccagacactctgcctggtggtcccatgacacacacattgggtggtcaggtgccagggcaatggggcaccaccaccacagtgatggtgtcttctttttagggtccaggtggtactggaccctataaattgtttgtgcctcatggatggcactggcaggaggtggttgtctacatgcacagtgagactcacagtcatcttgcctattgtttgaacccccagagcagccaaacgctgcctttcaaatggagtcactcagggaaagaaaggcacagcccaaagccactcttttacacaatatgaattaacttagagcatagcacagcctgatcccccacaagctgtgcagtctacgagctgcaatgcctcatgaactcaaaaaaccacagccctaaaaacagtgggcaaatacacatttgtgcactaaatatatgaggtttaaaaacatattccaagtgaagatgctagaacaattcactgtgtaaatcatggcctttaccaggcttataatgagacagggtctagtgcccttacccctattcttggtcaggaaactgaggcaggaagaggtgaccatcttgccccttgtctcatagtaactgcatgggccagggttcaaatcctgtcttcttctgtcacaaggctgtgacttggactgctgggttcttcaccacaggtgaaagccagcaaggaggatgactgttttctagctaataagttagcattcattccctagagtgttttcccaggacagccacacctaaggtttccacgatccctgtttatcttggctacaatagcattactcctaggatagtcagggggagcaggatgggttgcccccgggtgattacgcacagacagtcaccagatgtaggcctagagtaaggaaggaagggaactgtcctgtctggcccttctctttctgtgaataaagtaaaacggtacttcagctaagctccaccttcccagggctgtgtgtgagcagtttcttaccctttctggggaaaggaggatgtttaaatacatgctcctctcaaaggatccacttgggctgggaatatggctcagcagtagtgagcttacttcacctgtaggctgggttccatgcgcagcagtggggaaaaaaataaaaagttccttccatgtcatgtaggaaaaatcaagatcagagtcaagagtcaaaaaagcctaagattcaagtcaaaaaagtccccgctttcaccaagagcttacttctcttctgggagtctcttctcttttcccagatctagttgggattttgggctctactatctccaggcctcagtaagcaagagcggggaggtgcgccatttatcaacccacagccttaagcaaatgtgtaaccaccattactgccttgttatctcctgagccttcgtcccccaggctctctgaacacgatgtccacacctcctgccagcaatggtgtgtttgtcgtcatcccgcccagcaacgccagcggcctccgcccgcctccagccattctgcccacctccatgtgccagcctccagggatcatgcagttcgaagagtcaccactgggggcgcaggcgcccagggccacccagccacctgaccttagaccaatagagacgttcttgaccggagagcccaaagctttaggggtaagagaagctccctatgtgacctgagacaaaacggccgggcaggtagtgagcctcatgctctacagggaggggcgcaggcaggggataaatgtgagaatccattcatacaccagacagacaaaggttcttggagttcaccagtaaacaaaggaccagaactccaaagaggatgaagaatgatggatgggggactgcaacactggcaaggacagaaagactctctgaggagatgacactgaagctaaatcctaggtgttaaagtcagcccagcaagagctggatgggtgaagggtgagtttgcctgtatagaagagcagcaaatgcaaaggccctgagatgggaatgggtgtggcacattgaagggagatgcagaatactgacatagctggaacttagtgaacaaaggaagacctgcaggggtgagaatgaaatggtaggcaagagccaacttctgtacagatgacagtccacgaagggaggcgctctcctcttatctcaaatggccttaaatagtgctctctaagagggaataaaacatagatggtggcagataaatggaaaatacagatgacagattagagagataatagatgctgaaagacagatagatgacagatgagtataactaagaggataagctatgattgtcaggtgagagataggtaggatggataaataagataggacaaatatataggtaagacaaatagataatagactagataatatatagtaggtagtgactgatagataagatagatgatagattaagtgataagtgatggagagataggcttgtgaattgctaaaaacaaaagcttcaaattcaattgaggtttttcttagtatacaaaataatgagtttcacaatgctgtttttattcttgtgtatcattgttctttgcacataatcataacagcgtctatttgggtcaagaactcatgaagccaggcaggcctcagaatcaaaagaggttcaagtcccaaccagcagtgtgagcagtaacaaagtggaaagatcacctgactggctacagctgggcggtctcctgcttgagcagtgatgacagtggacatttgcctaatttgagtgtgatctgatccttagggtgcctgcaactactgtgctcagctgtctgtgttgggctaaactctactgtttatttaaaatatatgcccctaagttgggtttatgtttgtttccattctaagttagactgcaatttgctgcataggaagagacattaatgggatcctgctaaatcatacatatattatatatgcatatatatttctctgtgtgaacaacagaaacagtgtacgcaatggtgacagtgacagctctgagagacacctatactgtatcacatcatctcttcaaactctcaattctcagcaccgccttgtgagccagggagtccccttattattggaaagactgagagcccaaggcttgtcaatataagtcatttgcccaaggccagactgctggtaggtgacatcctgtgacccaggacagcctgtccatagagttctactttcagtcccactgtttgatcatgccaggacctctaactcaaacctgctagaatgtagacctccatcctaaaagctgaatcagggttatggtgcataaggtgactggggatagtaagttaaaataagatattggctgctggtggtagtgcactcctttaatcccagcactctggaggcagaggtaggcagatagctgtgagtctgaggccagcctggtctacagagagagttccaggatagccaaggctacacaaagaaaccccgccttgaaaaaaataaatattgtttctagaaccctgaaaccacagagaaggctctgggaactgaactctctgtctctgtctctgtctctgtctctgtctcaatctctctctctctctctctctctctctctcacacacacacacacacacacacacacacacacacacacaaacacaaaatttggtgagacaaagcaaatctataggaaatctaaataagtaactgggagtatgagccaaagggaagaacactacctgtcctagtcaggatttctattgctgtgatgaaacaccatgaccaaaaccaagttgggggagaaagggtttatttgacttacacctccacattgtagtctattgttggaagaaatcaggactggaagtcaagcagggcaagaacctggaggcagagggatgctgcttactggattgctcatcaaaggttgctctgtctgctttcttatagaacccaagaccaccagttagggatgccaccacccaccatgggctgggccctccctcactgatcactaattaagaaaatgccctactgcctgcagcctgattttagagagatattttttcaattgagggtctcttcattactctagtttgtgtcaaactgacataaaaactcgacatacccatgggttactgagtgtctatgagttcagtttcctgggttccaaaattaagatggtgttcacatcattgtgttacggttaaaagaggacctctctgaaagtagccagcacagtgctgtactaatgggctgctgacgcttcacaggacttattccagtggaagaaaaaaatggtgttgttggcagtgggacacacacacacacacacacacacacacacacacacacacctccacccagcgaagctagagagatggaaggtaggcaatagaggagagaaagcaacagaatactcaagtttgtgtccatgaatatcccaaatctttacactcaaattagaaagtgatatacagtccccatgactccaagaatgtgactgtcactgctcacggagatgtcgtggatagacgactcccttgcccgccacaggagctcctgtgggagttgatgcgatggaaagagtgccagggctgggcataggctgaactcaaatatcttccacatctctttctgctcagttctggtcaccaaaaaatgtttggaaagcaatgcagcagaacttaccacaaggccacacttcccagagagttcccacccttaggaaaaccatcccatatctgggaatgtttccgtggggcactgagaaatagaagaaaaagaggtgggtgaggaaggcaagagggggcagggaaggagggagatggaaagaaaatcaagtggagatttcagccaatggaagcagccgtgactccacccctaacccccaaggataggctaggaaaagactacagggagaaggcaagctaggcatttggttaccagagtgctgagagtcaaagaaccagggctcagaaaatcagacaagcagctcggagctgtgcttgacaactacagccccactcatactttactatttggcctggaactcctggtgggctgaggagagctggttctatcttgatttaatgctctggcctcagcctaagggaaagccaaaccagcggggatcggcgctcacttgagaggccagtagggagcgctgtggagcttatggcaggaggccaaaggcctgagcgctcaatgcctcccacagacggtgcagatcctgatcggcctcatccaccttggcttcggcagtgtcctgctcatggttcggcgaggccacctgggaatgctcttcatcgaaggtggcgtccccttctggggaggagcttgcgtgagtgcgggagttgccattctaggctggggctggtcctgcccaggtcacctctatctggcccactcccaacattcccctagccttagcccatcctaggtcagggtctaactcacctcccagactaacctgggcgtaacagttattattcacccctaaccatcataaacctcagcctgacccactcccagcaaacaggcagagttccaccagaaacagtgaggctcaagcaggccagagtccttatcacagccgcccttcctgcatcccaacccggcatccacaccccacccgcagaaaaccctcagtttcctctgtgtgtaccagccctgtctgagctgaactcgagggagtctctctgccctgcacccattcctctggacataccccactggagaaccaaatcagggcttccatgtctgttccgggatgccaaagaacaagagtttgcaagatggcactgctgtctgtggttctaccaaaggtgccagtgctgtggtggtggtgggggtgctccagctaccttcaggaagcacgggctttagggtcagcttaaccgggtctacactgaagccccactctgtaggatggtggagtcccttctgcgtacaccagactatctcagcaagggctcagaagcccctaaaaacggagctcagagaggccaacattgctaacactccagctagagctaaatggctgggaagaaactttaagtcccagctctaatggtctgtagtgggcccaagttggaggaaaatcttgataagcaggagtcaaggaagacactgcctcagaaagaaacaagggtagtggtccctctctgagctccctcctgcttcaaattctgtcacacaatgtgccccattcacatggtaggaagggaaaaataaaaaagagcatgcttgtcattctcagggacagcagaggcctgggcaaggcatgtgaacctcggtattcagtctttaccctagagtttcacagggctagggagatcgctcggagtgtaaagcacttgcacggaaagaatgagggcttgacttgtgtctccatcatccttgtcaaaagccaacctgagcttgcaatccctcaagagctgcctgctttgttctttgagacaggctctcttacctggacttggcaggcctgaccagtgagacccagggagggctgcttgtctatgtctctccagccccgggagtgcaagctcaggttggtttttgacaagggtgatccattttatccagaactattatgtttttgacacccagctactacttggtaaatatttgatcaatgaatatttgaaagtgcatgctatatgaggctttagtaatgtcaatgaaaatgcataccttgcaaactatggcttgaggtctcaagacagaggcctctttttgttgttgttgctgtttgtttgtttgttgagacagtctctatttgtagccctggctgtcctagaactcattatgtagacaaggctggcgtcaaactcacagagatttccttgctctgcctctcaagtgcgggcattaaaggtatatgctaccatgccagaggacaaaggcctcttagacaaccactaacacacccttagaaatatacccaagatgcctggccaggatgcagacaagaaagcttatggttctctgcctacacctgtgtcttcttggtggaatctagacatgatgtgtcctggtcagtaaccagccaaaacctcattgggccctcttttccccacacagttcatcatctctgggtccctctccgtagcagctgagaaaaaccacaccagttgcctggtaagtaagaatggagacagagaatcaagactggggatggggcccactcacctgggtgccactcaggacacccccccatcatcccatgcatttgtcccattcaacaagcatttcttggggattttctaagtgtccgtgtaaagaagttagatatccaaatacagaaggaagtgatggaacacttgcaaaatgccacccaagtttggaagtgctcatagatatccaggggaagtcaatgcaggaagggtccctggaagaagagacaccaagttgtctcagtaggtgagcctgggccagggaaaaaggaagtggggggcacagacagggggaggacaggcacctgctgcaaacctggcccaggaaagccaccaagagggtcaggcctcctccacaacagctcccaaggggatggaataagcaaaaagaggcatcaggacctctccctggggtcccagagatggagaagaaaaaaaaaagagtgagaatggaagcccagctgtgcagggctcatggccccaaccctgggcccatgggagggagggagcaggaggccagcatagtgagctagcaccccttgtcctttctcctctttgcctcttcttggtgcccctgttcctcccacaggtgaggagcagtctggggaccaacatcctcagtgccatggcagccttcgctgggacagccattcttctcatggacttcggtgtcactaactgggtgtgttggcacaggtccctaagggtactaaacctagaaagattaggactgcagtcaggaaactgatggaattgtccgcggccctaggctatttgcagagtctgctgctccaatagacctcatgagtgtcctgacactgtggctctactccaagatagggtgtgggggggaaggaagatgaggcctggcagaatggagggagggggcgggggatggctggagtcaggaagtcgggatccaggtttacctctgcctcttgcctgagcaagttattcttggttcagtggatccctttacttttaaactctcagcttgacttgactgtggctttgggtccccaggatgtgggcaggggctaccttgctgtgttgacaatcttcaccatcctggagttcttcatcgctgtcattgccacccactttgggtgccaagccacccgtgctcagactaacgcggtgagtactctcacaccatgttcaagcccctgaggaatgcctgtagcctgggaagagactgcgcctccaggaccctccctcccacttcccctttggggttgagttgttatgagtttgcaataagacactagggcccaaagttgtgaaatgggactattcaccctgtggccacagggggcgccagcactagcggcagagctgagatacttccggaggacagggttgggactggtaaggggcccaccttgcacagaggtgtccacagactgtgaacaggtgggcacatcagaaaagacagtacgattcggtggaagttaaattcatttttccctggaaaagggaggaaaaagagggggacaaaatgagagtgggaaggggggagggagggtactaatagcacaaaggcttgcctgggcagaaaaatgcagccaggggctagctggtgccatttaaggttggagcagggggatgagacggattcaaggagcacagtgaagggctacaggtgtggaagcagccagggaccagcgctgtggttcagacaagagctatagagccccgaactcagtagctgctgtgcagacaggaaacatcagctcactaggccctagagaaattaactttttccacttttctcactgcggtgtgtccaagccctggatcataactaaccctagaaagtattttctgaaatgtttattaaacggtgctttgtgtgtgtgtgagcattcggtactaaggagctgttctcagagtgcccactaggtggcactgttgcaacactcccggaagaccgcagagccatccgggattggggttttctgtttctttgcagtctgtgattttcctacccaacgccttcggcacggatttcaacatccccagcccagcagtctctccaccccctgcctatgacaatgtggcatatatacccaaggagtcatcggagtagaagacgcaactcctctgcttcaggttggagtccaggcttcccactctacccacatctctccatcttcaccttgttcgttctggggcagtccttccccaaccaggccctccaagtgacatacactgtgtcaccgagtgatgtgttccatcagtttcccatttcctccagtagtgtctttctaaaaaggacataagactgatgtccagggtgtgtgtccctaagcactaccccaccccagccttgtcacctgacatagatgtcccctgggctcctctgcactgtcctcgctcagctcatggagggaaatcttggcatcatggaggtttcacgggtttgccttcaaggagatcattaagcacagagaactcggaatgttccagaatagactggcgtttcagaggctctggccctaccacacagcaagacagtgggcctgactgacctccaggctcctgccccccaaaaccagctctgtcctttttcatctgctgttacatctttgagttttcattttctcacctggaaactaaaacgttaaactgcataaccacaagaccaatccaacactcctgggctctctggggtccttgggtctaagccaggtattgccctcacccccttccagaacctcctttcccggtttttaataggacattggtattggctctggcccttcccacatcccagacaggaggttgcagaggagactgactgacccttgcacccaggtcatcatccacaggtacacagggaaagcctcactgaccctcctgtattcatacctcacccctgcctgaaaagtaagggtgtccctgagagttaaccatggaaacaggggtgggtaccaacaggaataagacaccttcagcccagtgttcataggccctggcatatggtttgtttcatccacactgtggagaaaaataaacagtgtggcttagattttgagttggtctcaatgtagtggctttctcttttttaagtttgaggtctcctgagggctgtccatggttaatcagaggtttgggtaagtgtcccatgaaggcaggaggtcacttcttgcagccagggacatttccatgccttgacttcaatgatgattacatgggtaattgcctgtatgaaaattaactaaagtagaggctggggagatggctcagtgggtaaggacccaacctgagtctagatgctcagcacacatgtaagaagaggggcacagtgacatgtgtccataatcccagcactggggaggcaatgacaggaagaaccctggatggggcttgcttgaccagtcgatccagcggaatctttgagatccagggttagtgagagaccctggcttgaaaagaaagatgagcaaatggaagaacaaaggaagccctaggaagcttgagcttagccaatagtacttttctcaaatacagccagtatgtgcgtaaaggataactctgatgaagctccataacacattgcctgccaaactctgacattaatcacaaggaccaattgtactaaccctaactaagcacatgaaagttctaccagatttgcccaggctcccaccccagtctagtttggatgcccattttctgacctacctaaatccatatagctttgttcctttcccagaatcccatggagtaatctcccatgatacccttccaacttcctcatgtctagatggaggactcagcatctatgctaacctctaccaggtttatgctgagacagatatgaataagagatccccaaattccatctgggaatgggcatttctgggtcgggacaatgagcaaagattttggataaaaatatgagagaaaactcagcccaacattggcagagcacacgtcagtatctcttcaatagtttctatgggagcatcatagctcacctacctcagggagctgatgctgcagcagtctattgtcaaatacccaaggatgtgtaacattcaaaataaaagagggagatttgttaactttacagctctggagactggagatcaaaaggtcacatgtggcagtggccttccagcagagtctaaagatggcacaaagcgtcacatggcaaaagacaaaaaagatcatgtgtgtaggtccactttatctcctttcctgataaagccactaggagtcatttatgtgggctccctctgatgcccttctaatcctaatcgcatcccaaaggcttcactaacccctcaccactgtcctcagtttgagtatctcatagctgacataaaggatggtacttcagcatgggaccttgagggggcactctcatggcttcccagggggctcttagttcccattaggtcggttccacaattgttaagactatacttaatgatcaaagggggtggggcatggaaactgactattggctttattcctatgataaagtcagttcctcccagagcaggtaggaagtattttttaaaagctggatttctatttatttctttaaacattactagttttgcctgatcttaaacttcacacaagtggagttatatagcatatgcatttctttgtgcctgaatcctgttactgaataaaatgtgtcaaagatttatctgtaacatcttgtgttttcattttattgtttttaacacttttataaacatttgtgttttattctatcactttaattgatttacttgttgatggatagctaggttaattccactttgggtcatcatcaataaaacccaactttcttgaacacacacaaagaaaagtaagatgcagaacaattacaagaagatatccaacattgacctctggcttcaacatatacatgtgtgcatgcttgtacataggcacaaacatacaccgtacccacccataaacgtgcatacacagagagatatggacacacaaataaaccacacacacatacacacaaattaacctaactgggatgcttcgtgcccttccgtatgtgttattacctccatttttaaaaactggagaaaagataaataggaaaagcacaggtgttgtctaattctgcatgctacagcctggacagcttgaagccacacacattcaccgtctcaccacatccctggtcaagatccagacgtgcctttgatgggtaatcctctttgagtcacacaggctgcaagcttggtggtggctggacttcattctcagggtatcctttacttatggtcacatgaccatagtttttaaaatcatatcttttaaagataaacacagacatgtttacaaagatgacggtatagctgagtcttgattaccaccagagatcaagatcaaccaagaactaaggatggccctagctagctttgggagggacacaaggagggggaggcagggatcataatgctaatctctctactgtgtggatacttggactttcaaaacattagaaagattctctcaggggcagcaagatagctcagcagctaaagttactgcacaacctggcaacatcagttcagtccttggcacccatgtaaataaaagtgaaaagagagaataaatttcacagagtcaaagctgtcctctgacctacacacacacacacacacacacacacacacacacacacacacaccacagcaagggtgccccccacatacttcaatcacacacacgtcaaacgcacacaaataaaaaaaaattgaaaattttagtaatcaaatcactcagtggctgactccagcaacatgacagatgccgtgcatcagttctgctccattaattgtctgagctgtcaacgttgcaacattaactgtctccactgtcgaagggagaggactcggattctcaactgctcaggtttggaagcgacgtggttttaaaggttctcgtccccacacgcagctctcttgagctgggagcttgagcaagggggcgggccctcgaaggaaaagatccaaagtctaaagctgtaaagatgttctgatttcctcctctggctctgctgaggcagctctagatggtaaggcaaggcggaagcccacagctgaggctcctgggccgggtgagtacccccctccacagcagaaacaaacaagggggttgtcagggcctcagataggattcaacctcagcaggagaccagcctcttgggctactcagtcaatagctgccagttggaggtgagtggctgtaacttgactgcccccccacccggggggggccccaaaagggagcaggggtgctgtttatcaagcaacagtggcagtagctggcgaacagatattccatgctgtggagccctgggaaacaggattaccatcagactctctccaaggaggaatctgctaccccgccagccagctgcccgttggagatcctgagagctgagaggattgaccttgagcacacagagagccaggtttgaaaagcagacagaggaagggacctgtggaagtccgctttcccagaaccatgctttacaccaaatacataggccccaggcccagagaaaggttgctttgcgcattcctgggctccttctgaactaacattactaaaaactgcatcttcttagggcggctgacagcagcctctccatcacacgatgtgactccatacctctcagttcctttctctgcctgacatgacatacacacatcgacacacgcgcacatatatgcacacatattacatacacatatatatgcatacacatgtctgtaaacactgttctcctgttctcttggcttcttctgcgccatctaattagggtcacattcacagcaaggttttctcaacttcccatggacaaatcttaccggtccaacacatgtagcctggtgtccagctcattgctctacagacgagtcctgaagggctatgtgggctcccagttcactttctccacagaccaggtactctcccctctccacaaccttcccaagcagcaggagcccttagcttactcctctccctgctctgagcacagatcagatggaggcgatgaacttcctactcctggtaattaaaatagaatctgtcttaacagagaactagacaaaggtcagatgagattccagctatagggaaagttggtggtatccctggcttttattgctaaattccagcctctgcacctggcaccatgtaatcctcacagcccacccttgaggcaggcactggcgttcctgtgtgctcatggaaacagacttagacactgagatacaggagtagagccagggttggacctggcatgcccgcttggaagttcatgttctggcccactgagggactgaagggttctcccagctgtctctgcttcccagagcctaaggaaaggggggatgtttgcagggtccagaaaatccaagaccctagtggtccctgagataccagacagatgtatctgtgggtcctcagctgactaaggagcctcggaaaggggataagtaaagaaattttccctcatcctgccagtccaccttcatccccaaggcagttctgccccagtcctggaagcaagatggactaggctacagggcacaagtattctagaggcttgtagccaacaacagctttaaaagatggactcctagagaaacctatgagggtgggaggaaagagaggcactattggggaggctagcagcctggtgtggtgatttgaataagaatggccctgataggctcatatatttgaatgcttagtttccaaagagtggcactatttgaaaggattggaagtattaggagttgtggccttgatggacgttggtggtgcacgcctttaatcccaacactagggaagcagaggcaggcagatctctgtgagtttgaggccaccctgttctccagagctagttccaggacagcctccaaagcaatacagagaaatcctgtcttgaaaaacaaaaacaaacaaacaaaaaggagttgtggccttgttggaagaagtgtgtcactggggtgggctctgaggtttcaaaagcccatgccagacccagtctctctcccccacctccctctccctctctctgtctctctctgtgtctctctcttcctctctctccctctctctttctctctctctccctctctctatgtctctctctccctctctctctccctctctctttctccctctctctctccctctctctgtgtctctctctctccctctctccctctctgtctccctctctgtctccctttctctctccctccctctctccctttctctctccctccctctctccctttctctctctgtctctctctgtgtctctctctccctccctctctctccccttcctctctctccccctctctcttccctccctctctctctccctctctctgtctctctgtctttctctgtgtctctctctccctccctccctctctctctctttctctctctctctctgtctctctgtctctctctctctctctctctctctctctctctcccctctctctctgcatgaggatcaggatgtaaaagctctcagctacttctccagtgccatgctccccaccagagtttagaatgaactaaactctgaaactataggcaagctgccaattagaggcttttacttttgtcatgatgcctcttcacagcaatagaacaatggctaagataaaagtgggtaccagggactggaatattgctgtgacaggcctaaccatactattgaagaaatacagactttgagactttgaactagaaaaatagttgaacactttaagtggggttccatgggccatagtaagagaagcatggaagacagagagcgatgtagataatgagagctgattcaagaagtttcagaagggaagaatataataataaatggcctagacagctttcttgagatattttaacaaacaatgtggctgctttctgcccttgtcctaaaaatctgccaggagactaaattgaagagttttggattaaaggtgttggcagagatgattccaagacagcccagtgtcggctacgtcgtgtggttattagcaatcactcttatatgggtctttaatggaaaaaagtaacttggacaaagagaaatacaaaatgtacagtgtgagaagaaaaggaacactaggataagtgatggtagagccaagtccagtgctcaaggagataaaaaaaagtttaaagaaaatcctgatactgaataaaatataggaagtagtgaactaagggcaagaccccaccaagctaagcttccagcttgtgagaaggaattaaagaaaagcttaagcagtaaaagagaccaacaacaatataaagctgatgcaaacgtaactgaacaagggggccaagttccagtcccatcaacagcagaacttgagagttctggccatgagattctggctttagaatcaaggataaaggaaggggattgtggaatcctcctccatggctcagagaagccattaatgtggccaaatatgtgtcaggggtgtccctgcatggatggccagacaggccattgagtaaaggtatgagtaacttgattgccttggagacctcaagatggggatacaagagtcatgggatacctgccaagaaaagttgcagactgggtgtggaaccagcacaagcgagagaagtatgttgcagtcaacaaagatgaaaggagttggagatctaaagagtgttttagcatcagacatgaagatgtggactttagagtttgcctgctagttttcagtcttgttttggtccactatttcctcactgtgctccctttcctcccttctggaatggcaatgtatattctgtgccattgtatgttggaattatgtgaactgtgccttgatcttggttctataggggattatagttcagagattgccatgagtctcagaagagactttgaactttggactttcaaacagtgttgaaactgtgaaagactgtggggacttttgaagttagactaaatgcattttgtattatgatatagctataagcctatggtggacagagagtagaatgtagtggtttgaatgaaaattttccttcaataggctcacatatttaaatgttcagtcactagggagtggcactatttaaaaggtttagatggattaggaggtgtggctttgttggaggagcttcatcactgagggtgagctttggggtttcaaaaacccatgccagacccccttacctctccccatggatcaggatgtaaagctctcagctacttctccagtgccatcgtgctccctccctgccatggtaacaatgaactaacctctaaaactgtaagcaggcccctgcttaatgctttcacttataggagttacttttgtcatggtgtctcttcacagtaacagaacagtgactaacacatgtagaagaggggacaggctaaggtctcaagttcaggtctagggaagtggggaatttcacaagagggttacattgggagctacatgtggaagtcagaagtctgtttttttcagaacagtgatggtgatctcctagttgagtggcccttatcttgaggacatggcttagtcagcagcctgtgttttgtagagcagtgatgacaacctcttaatgtcgaggcccttatcttaaggacatgattctggaatgagagtgaattctagagcctggaagtgaaaacagtaaaaagacacagtaggatggagtcaccgatgggcaacagcttgcttccatcatccccttcatcttagaaagtggcaagggacttcataacacacaacccttctcctctggtgtccaagatctgcatctggcccctccccgtcacgagtatacaaagttcctcttagtgcctctccattccaatttcaagttggaaataagttttgaagtcagagcccaaccctcagcccccagttccactatgatacacacccatgaaaacaccaacagcagggaacagatgcccaaaaacctagaaccagaggtttggaagtttgtcgtttaacccaaagcaggcccacagaatatcaactgcagagcatgcctagactctaaggaagaagatcctctacagtaaattaaatgtagaaaaatgtccttagtatcaaaacagggcgcatccctgcaggagtcctcggagccttgaaaaagtaagaaggtgatgtgctaggtttcctaaacttatttaaccatggacccctttaaggcagatccattaggaccagtgttccatgggatatgctttgggaaagagtactctgtcctaattccttactgggtatctaaaccatttccactgccacagctcccacaagcaagtgcccaggtggatacacctcaccatccccagtgcccagagagccattatcataattagggttcctttgctgtgaagacacatcatgaccatggcagctcttataaaggaaaacatttcattggggctggcttaccgtttcagaggtttagtccattatcatcatggtgggacatggcagcatgctggcagacatggtgctggagaaggagctgagagttctacatcttcatcttcagccagcagaagcaattgtgtgtcacactcagcatagcttgagcaaaggagacctcaaagcccactctcacggtgacacacttcctccaacaaggccacacctactccaacaaagccacacctcctaatagttctactccctatgggggtcattttctttcaaacccccacagtcaccaccccttagaccccacagttcatcccacctcttctcctaagaagcttcatctgaagtcatagctacctcagaaaggtctgcagaaagctacacaattgatggactgtagacactccagggtcagctctctgggttcagcttcactcagcctccccactaaaccaggggctgtccctgtgggataatggagatatggaccaggggctcccaccagcagcccaggccaagaacacggagtgatgggatcaggtcacaagtagctttaatcccaggcacttcctatcatgtgactacggtcaaggccctggacctctctgaacattgggttcctcttctatgtaatagtgctgatgtcctggagcttgaaggaggtcagcctataaaaccccacaaatggttctggcatcaggaccaccacctggaccctccctgtcctcaccaacctcccaaggttccttccccatctgtggaaagaaagcaatccccatatctccatggaagcacagaaatttttaatgaattaaaaaggatcctctgaattcacaaatcagacttcaccccctttttccttgataaagaatctgacagaggagctagatggctcaatggggagcaaagctctcatcacaaaagcagcaagctgaggaccattgttcagattcccagaactcacataaatgtcagtcacttgtcatctcaggacacagcagacagatggtcactatggaaggctttaagtccatgggctctgggtcagcctactatgcttccaatcccatttattgtctgtgcaaccttaggcatatgatttaacttctctgagcctcatatacaaaactggagtgagaaaagcattttcctcatagaactgggatgcagacatgttcagatgatgtatataagatgcttatatcagtgattggaacaaagaaagggtacatgaatgttgctattgtagacagtattaaatattgattcgctggctccatgttggctcagagtactccttggacagaagtctctttctgtcttagtttgagtttctattgctgtaaagagacaccatgaccccagtaactcttttaaaggaaaacacttaattgagctggcttacagtttcagaggttcagtccttatcgccatggcagaaggcatggcagcatgcaggcagacatggtgcaggagaaggagccgagaattctacacctggatctgcaggcagcagaaagaggccgactgtgagccacactgggcatagctggagcataaagcccacccccacaggggcacacttcctccaacaaggccacacctcctaatagtgcccctcccaatgggccaagcattcacacacatgagtctatgccggccatacctattcaaaccaccacaccttctcttctctcccccatttctccaaacccaaaagacatgggcatggtttggttcccatcaccatcagttgtctcattctaagccacagaatggggactgttcacaaaacgccctcatgagccaggcctattggcccgtagctcctgccagcctgcattatagccagtgggagctctctcttgaagggtttatctaattattctttatcaataaaaactcgggagtcagatatcgggataagaacctgaatgatcagagaagtggcagaaaagcaaccagtgacttccaatctcttttgttcttccatccaaaagggcagaaaccctctctaagcaccaccctactacttcctgtctctctatctgtcctcagtcttccaaaaccactatgattaattttggtcagctagtagctagctcctccctctgattcaaagcaaacttcattgtcagaatacgatcaaaatatgatacaacactctcttatagtgggtatgaagttcctctggtcttcatttccctgcaaccccagagaggctgagaatagcagctatcctccattcccaggttctagcttacttccatttaaatcaaagtcaatgagctttccactttctgagtccccactgggctttgcggaggacctttttctgtgtgtgcttatatgtgtgtgtgtttccccagccctaataaaagccttactttgccttctgaaaataaatcaagttcaaaagctactggacaaggcctccactttccaggggcagagatgacagtgagagtcccattcaatcctcagacacaagctgaactctgacaaggcctttttcttggttcacagccagggtaccctgccagagtcaatggctgcacaagctcccaaggtgatttccagcagtggcaatgagaaagtctctcagtggcagggcctagcacctgcccaacctatgcagaaagtggcccagcatctggctccagatgggcactttgagaaggcccaggagagaagtgaccttctgcagaagttaggggtgagtaggaaggtgactcccagggaggaagttgagcggaagcccccagcttccatttacactcatcctaaaatcaaaacaagtacaaggggaggctggtgctttgtgggatgtgaacagggcccaggataccaggccaacagagccaggacaggatggatgccccaactggggttttgacatccttacctgtcactatagcaggccctggggaagggggtccctccttgatgaccaggacaccagagcagtggggaaaggaacttgctaccaccagtaagtaagtccaagcactgatggccgtgcaggtccagccgtctgccacctcactttagtgacttctggcttcccacccaggtttttcacattgctattgctttcgcaaacctggcctttggcagttacctcgtgtccacagttaagaatcttcacttggtggtgttgaagtgctggtatccaatctggggacctgtctctgtaagtaggagcacaaatcggtggatacagaggttcacggggcccctgggagaccctggcactggaggcataagcccatcctgtctccatctcccctctctctgctccgttccctcagtcacactagacatagctccttcctgggggcacctgtcactcgtggaccctgtggaccctcctttaattgaagcatgtatgttgggcagggagaagagccagtatggggtaggttcgcaaggcttttgagcacccaagctacctttgtagccacagcaaccctagtgccctatcaggctgtccctgcagcaacacacaactgtgattcacaactctgtccttggtgcattagccaggatgacagacaatatgagactcacacacacactgttccccagaggccccatgcccctccaggactccagggcctctgtcctggccctgaaaactgccttcacacttagcctcagctccatactgtcctcttgggcaaatgttttcacccctatctccagtttcccctcagtcctccatcaccactgccccagtttgcattcccaacatggagacatggctttctacacatgaagtgcccatcaccctgtgttccccaggatgggcacatagcaaggactcaacccacatgtgaaagatcgatccaaaacacactagacctgagatccaagagcactgaccccccaagtgcagggaaaggtgagggaggggggttaatgtgaccccagctgtggatttgcatgaggtctggaggtttgtgtcctccatgcgtgagcatgttgaggagcagagcctgttgtgggcttgctctgtccacagagtggtgttctctgccccaccggccaacaggggtttgattgctcaggagtaaaggtggttttgtgggttttgaagcacctcagctctctcctttgaccctcacacctggtctgcagtttctcatttcagggatcttggccatggcaacagtgacatttcccaagacccctctggtgagttggcacctggagatctttccctcaaagctagggggcaaacaaaggcatctgtgtacagggatgaccggaggtctggccgggagcaagagccggaagagggcatctgagaagctccagatgcagacaactgactagatttgacagggaagaaggggagccccagccagagctcagcctgtcaggaatggctccaggctcccatccctccatccagactagaccgaggctcctctatcagttgcttttctctctgtgtgacaagatacctgatagaaagtgactttggtttaagagggtagagtccacagtggtgaggaagacttagacttggcagtggaagcgggaggctgcttgagtggatcggaaaacagagagaagaatgctggtacgcacctgactacttattattcagtctgggccaccctcccgcaccgtgggatggtgctactaccttcagggtgggtctccctcatcagttaaaactctcccgaataccctcagagaaacgcccaaaagtgtgtctcctcagtgattccaactctactcaagttaacgatgaagacaaaccatcacagcttccttccaaatctatcaaggttctttttaatttacttattcttttacaatttcatgcatctgttttatgtactttggtcctatctctcccaccattttatcctctcctatgacttctccctcccacaaaaccctttcttcctcccctcaagacccgctcctttcctgtctttcattgttttttgctgtcttggtttgtgtttggaacccactgtgtttaattaatgctgcctacatggttatggatgggccttatttgctgtagcaagggcaaatctatcaagttttgacttcactcattatgtggtcctaagccagcagctgaggaccaattggctctgtaccccttccctgagtcctggggctgcttctagacagcccctcagctccacaccttctccagcccacaccctctcttagctcccttctatccccatcaactctgatctgggagagtcatccacactgtctcctcacagcagcccaagggtttgttctggagtatactgagcttctcagggggtggtgcaccacccagcagacgcaggagacacctcgcagagacctgcatgacaggatggggcctatttcaggagcccagcaggatagatagatggagaggaggaaagactctcagctatgaatgggcaggacacctacaggctctccctgcccttccctgtagggtcctctgaatgttagactcagactggcttgcttagtgtaagatgatcattggggagtgtgtcatgatgcatctttctttactataaaccccatgcacctggcagcagctcttgggtccttccagtgtgtcctgtagaggatgttcgtgccaggaccttcccagcaatcagaaacccaaagcctggtatgcaagttagcagccttaagacagacagagtctccaggtgtcgagggagggtgtcacagaccaagctcctggaacgcaggccttgaactggatcgctaaactctaacatttcaactctgcttgcagaagattctgtgtgtgacagcaaatgtcatcagcttcttctgtgcactggccggcctctttgtcatggccaaggacctctttctggagagtcctttcccatggcccatctggagaccataccccaacagcacagtgagttcccctcccctcgtgagtcctctgattccaagggggaacagccttgagcttggctgagcagaaacaatcacgtctcagaaagcctgtcctggaaccaggcactgcccatctgtacacaagcctccagaggcacagtggaagcagcatggctgaccttctcctgagtccacatcacactgtgatttgagtcaccatgtccagccctacttttatacatgggaaatctgaggcccagagaaggggaatgtcctgctagatgctgagcagcaagctggctgtaggatcacaccctagaactgctgattctatagctaagacaccttttcccaacagctttgcagaactggctcaaaccactttattacccccattttgtggcagtgaacactgaggttcagaaaggataaatcagtggccaaaagtcatgcagcaagtctggggtacagtgaaagtttaagctttcaacatcgagtccagtggtctttcactataccatggctgcctctacaacaagaggaagcactgccactcggccaggctccatggtgacacacagtgaatgcacacacatgtttccctagtgaatgtcagctcaccccactataaaacacactttctctctgggccaaaacaaccccgtcatctgagtagaattgtccagatcacccttagggctgcttccagttctcccagggtcttgataaactctctggtccccacacttcgggaaaccactcacccctatgtgccaggcactaggcgtgaggcaggatggaaacagccccaatccctcagagtccctccctaccctcctggggagccagagccctgctgcttctgctgttcatctgcccagcagacccagatgacaggcaagtaccaacgaagccctgccccgtcttcctgccactccctgcaggtctatatccagagactggagctgaccctgttgtgctgcaccttcctggagatctttctgccagggcccacagccatcacagcctgtaagacagaacgcctgcatgcagaggtgaggccttcctgaagacaaaccctcaagacatggaatgttgggcagcagagagctcagaatggacaggcagcaggcaggggtcacaaacaagatagcaggacctctgtggaacactgcatgaatctccatatagttaatatagttatgagccatagagacacatgtaaaaatagctttacttcatcttctcatcatcctttcaggcaggtatgttcttcccactacacagaaagtaaactgagacttagagaaatcacaccacctcctaaagcctagacccagcccagcccatgttgggaatcccagctgtgtgagctgcttgcccacagtccactggaggtggaactagaactcagaacccaccaactagcttgatcagtgttggagagacaggcacaataagcctctggaagttccctcatcaagcctcatatgaaccttgtgacttcaaaagtgactctgccaagacacatttcataaatagctgatcatacatgtactgggccaatggcaacaatgatttctcatttgcaggatgacacccctcttgttcctgacacacctatggaacttgaaggtctgtcaatggggccaccatcctatgaagctgtgacccaaggtaacacataaatgagcaaattaagaggtgaagaggttctcagcctgggctccccagatcttcagaagtcaccaccgtctcttctccctaacacagacaggagccacttcccctggggaaaggacaaacagtgctattgttaaaacagtccacctagaaacaggtggtggtcccttcccctatgccaccaaccccagtcccagatacctcagagtctggttcagctggacaaagcttcttctgctgaatcagggtaggaccagatgccctccttgccagcctccagggtagctcttaggtgagccatcctactccaatgtagttagactttcctttgggccaccagctcacaagtaacacagaaactaattattaattaggaaagctcagccttagcttaggcttgtgccactagctcttataacttaaactaacccatttattttagtttacattctgtcatgtggcttgtaatctcatctctccaaactgcccatgctgctttctctgcaactgcctcgtgactccaccttcttcccagatttctctctctcccggaagtcccacctatacctctgcctagctattggccattcagctttttattacaccaatcacagctatgcattttcacagagtgtacaaatatcccacaacaatcagcctcccacccacagtgggtgtgcaatggctgcccatagctgggatggatgtcataggctatttctagagtcacgaatcatgggatttggggacatccagaaagacatcaaatcaaaaaccatacaaggtctctgtttctgggacctcattgtctccatctataagtggaggggaagtgatggccgtgatccaggaggctcctgtaagctagaaacctgaggtcagaagcagagttcaagatgagactctgacctaggaattctaaacctagtcatgctggcgggcaagccgagggaaggacctgccctcctcctccccagccttcactgctcatagggaatttctggctgggctggctgagttgtgggccacactgggttctttctgtttctttaaattgatttgtttcttatattattttaagtggtctctttttagccataaacactttaataaccaaagtaagctccccaaataacaaacatggtgaacctaaacatcaccagattcttgaccccctctgccataacctcatctgccactctctgatgcagccttcctaagggaccttgctattctccaacacacaagcacaccctgcctgagccataacccctgcccttcctcacctggacctcctcctcctcctcctcctcctcctcctcttcctcctcctcctcctcctcctcttcctcctcctcctctgatatgggcagagcttgctctgggtctttcctaggccaccagctctggaccactgctggccttgtagatactttccatcaatctccacttctcacaggccccagtagcttgagagtactctaacaatgctcagtagtaagtgctagtagagctccaaactgaagtcctgccccactgatggcacacaagatggtggcagcatggctctggctctccagaagggacatttcatcgagaagggagaccagtactttcaaaggaatacctgcaacatcagccctcttagctcttgggagcccatcctcccagcagcctatctcccacacagcaagggcttagcacagatcagcccagattttttcactgagtcctctgggaatgtgggtccagaaagcactcggtccttgctattgacttgaaggaactgccaagtaccccccacgcccaccctatttgattctaaacatcattgaattgtaatggcttgggtccatttaaagaactatattattacatgtgcatgataagagtttgtagctcagttgtcagagtgttttcctagctgggaaataaccaaaatggatctattcaccttactcagcttgcagaaaaaaaaacgtggagatgaactttgacttcagctacagctcccatggcccttgaacttgtaattctagattccaatctcatcaaactgctatgtaaaaagaatctttgtgaatcatcttagttaacctcatgccacaggataaaccaaggcccagatgggtgatgtaggctcactgagtgttacccagaaggtggctttgatggacatgaggctggaccccatgtctgatgttatcatctccctggccctgtcccacctgcttcctgggaccccgagagctagaagaagatcacctcttgtgcccagcacccaccatagctcccaaacctattgtttcctccagtctgagattctagccccactgccaccccagaaacattaagagaaacccacacatgggcctcctcctccagcaatgaagaatacttcagccctgagacaggtcatggaggcctaatggttattcctttgtcccgcagataaacactgaattcttactgtgccaaatccatccccacctcccagtggctggactccagtgttgagacagacatgacctgcataaataaatgtataactcctataaagagaaactgagatgttctgtgagtgtgatggaaacagagggaagtggagtggaggtctgtcaagggaagcctacaggtccagctgtccaggctctgccattttttctttttctcttcttcttcttcttcttcttcttcttcttcttcttcttcttcttccttcttcttcttcttcttcttcttcttcttcttcttcttattcttcttattcttcttattcttattcttttcttattcttattcttattcttattctttttgtgagtgtatgtggtgagcatgtgtgcatatgcatgtctgcatgtgtggagtatgtgggggtatgcatacatgtgtgtgcatgtggaagctattggtatttgaaaccatcctagatcggatgtggagcctggggtttatcctcattaatcctccttattcatggcagtgggtcctctcaacccagagcttgtcaatatggctgttcccactggccagcctgctctgggaatcctgtgtctctctgccatctaagcctggaattacaggtgagccacaatgccctctcaccgtctacataggttctggggaatctgtgctgcctagttttatgtcaacttaacacaagctaaagtcacctgagtggagggaaactcaattaagaaaatgcctccatcgataggtattggtggtgcatgcctttaatcccagcacttgggaggcagaggcaggcagatctctgtgagttcaaggccagcctggtctacagaacgagtgccaggacaggctccaaaacaatacagagaaaccttgtctcgaaaaacaaaacaaaaaagaaagaaagaaaagaagagaaaggaaaagaaaagaaaacgcctccataagtttggtctgcaggcaaccctgtagagcattttcttaattaatgattaatgcgaaagaacccagcccattgtgggtgatgccatccctgagtgagtggccctgggttccataagaaagcaggctgcataagccatgtggagcaagccagtaagcagcacccctccatggtctctgcattagctcctgcctccagatttttgtcatgtttgtgttcctgttctggcttctttcaatgatggactatgatgtggaagtataagccaaataaaccctttcctcatcaacttgctttttgggcatggtgtttcattgaaacaatagaaaccctaagtcacaatccaagctccaatcctcatctttgtgttgtggcaagtactttaaccaatgagcagtctcctcagtcttgctagttccttctcacagagactcagtccttcccaggcaagatctaagtcacttcccccatccctctctccttccaaattctcctggtgcctggcattgactctgaagcaaactaattgagtgtaccaggtccctgtcaagggttgaacagtcacacaccctgaggatacatgctgagatttaatgcaaggaattggcacatgagattatagagcctgcagaacaagtcctggatgggtggaacatccacagggcaggccatccacaaggaggcagtctggaaggctggagtcaccacccacaggggacttcctgagactcataagcctctgtcctccttccaggatgcaaggtttctactgggaggagacctacataacaggggagccttgcttctgctttgtttgcctctccacagatggagtcaggtccatcttgattagctaagaaagtctctctcggtcagttatggacttgatcacaggcccagaacatcttcacaacaaaagccagactcgactcttccgagtagctggggaactggactgtgacatgactttccttgagagcctgtgaacaaacatctcttcactgaaaacggggaatcaatgacaaagcaaagaaaggatcccgccctagtaaagcagtgaatttattggggtcacttgcaggagtgactcaaaagcaacttgccaccagcgtggagacacagctcataacagctgcatcttgggtgttgttattttgcttaaattagaaatagagaaaaggaggcgagagatgagacatgagactattagacacggtaaccagtttattataggcccagcagagtagggagattaagagagaagagaaacagggctaatggctgaccaccatggccggtcgccatagaaagagagagagaagagaagcagaagcagacagagaagagtagagagagcgtaaatggtcattgagtctgtcttttaaaggggtcctctgcacctgcatgcagacctagttcccatggaaccctgggctgaccagggtactgcctgttccaccaggttaacaggggcaggccagcaaaatgcctgaacctttcacttggcgctgcctgtgcaacttggcaccagacccaaggaagcatctcctctccccagtgaccttggggttgggtcctcaagagttccctgactccctggactccttgtgtgcttccgagtcatatgcggtccccgccctcctccaggtaggaatgtttaggaataaacaacacaagaatcttaccaaggccacctaccagaagcctgtcatagtcacacggaaacaaagcagcacaagaccaggtgattagactagaatctacagaattacctttgcaagctggagggggttggctttccaacatccccacactaagctttttacttcaggccactagcgaccatttattaagtttttctctgtgccagacaccattgtaagacaacttttgtaagatattcttaacaaaagaaaaaaagaaagaaagtcttaggaaactcaggcagagggaggttaagccatttcctcatagttaaatggtttaaatgagaagtacacttggtccccagatggtggtgctgtttggagaggtaatggggatgtgcagccttgctagtacatcactgggggtgggctctgagaatacaatgtctccgccaagtctagttcgctttctgcttcatgcttctggttaaagatgtgagctctcagcttcctgctcctgccactgtgcctgtggccacgcttccttcctttccttggtggactctaatctctctggcacaatacaccaaaataaagtctgtcttctcttagttgtcatggtctgtgttttaccacagcaacaacaacaacaaaaaaagtaactaatacagtcacacacaagagtgtgctagaaccaggaatcccacttagtcacaggctggagtctgaactcaagatcattctgccatcttataatcagcaggcttacagtctcagggagttcagaaagtcaggagtctcatgagggcactccccgggattaaaaacaatagacaagccccaggaagaagccagtcttccttggatctgcccacaagttagacagccccgcccgcccctgggtgcatcttttatgaactgtgtcactcactcctggttcatgtatgttggaagtgtctgagcagggcattgacatcctctcttggttctcaagggtgttgtgggaaaaaagggccgtggttgcaggtaaagatggtattcctccagggacaaatgatgaaatccatggtgccagaaacagggtgtggagcctcatctgactgatgaccacctctgaaaaaagaagtgagcagatccacgggaaaaactctggagagtgcaaaggtaaacaggaggttgaatgtggtggcacacacctctaatccagacagaggcaggcaagatgtttgtgagtttgaagccagccaggtctacatagggagttttaggccagccaaggcaatatagtgagactctgaccaaaaaaaaaaaggaaaaaaagaaagaaagaaagtgtaaaattgctagaactggagccctgaagtcctgggaacatagaaagggaatccacagttcaccctgagatggagcagaagggatatgtgagaactagatgtgtaaactggatctggggatagggctcctggtgaagtatacagaaagacttggcacaaacagagcaggatgcaattacaccctccaaatacagaagactccactacacagatgtatgcactccaagttggcagctgagatataaaccacatagtcaaaatcatccttgaaagtctcttaaattggaaccaggggggatgactcagtcagacttctggcacccatgaaaaaggcaaaggcagaggcactcatctgtaactctgtctctagggaggcagaaacctggaaatcccagctgtgctgcagtcactagccagccagcatagctcagggttcaaagagagatcatgtctcaaaagataaaggagagagtaacaacacacacacacacacacacacacacacacacacacacacacacgcacgcacgcacgcacgcacgcacgcacgcacgcacgcagtgaatctctaccctccacatgcatgtacacagacatgaatgcacacttacattctgtcttagttacttttctattgttatgataaaaatgcaaggcaacttataaaagaaagcatttggggaggggcttacagtctcagaagggtgaggccatggccatcatggtggggagcatggcagcaggaaggcaaacatggtgctggagcagtggctgagaacttagatctcatctgcaagtacaagacagcgagagctaactgaaaatgctgtgggccttagaaacctcaaagcctggccccagtgacacacctcctccaacaaggccacacctcctaacccttcccaaacagttccactaactgggggccaagtattcaaacatattagcccatgtggaggccattctcattcaaaccaccacacagatgtgcacatatagcccccaatacacacacagagagagagagagacagagatggagagagacagagacagagatggagagagacaaagagagaatcccttaaatttccaaatgtccagcatgtaaaaccaagccacctaaggaaatagcacatgcctccatttcccactagagtctctctgtcaacttctagagaagaagtggaagaaaggggtgactggttatttgtgttacttttcttccccatccccaacccttcaactggtaagaaagtcaggaggagaaggcattcacagtcgaacctgacagagttcagtgccatctatgggatctgctctgagttgatgggaccaggctgaagtacaagatagaacttgtcagtggtgaggggacatgaaaaacatgagggaccttgataagaggtccttctgggatctagattgcctggggagccttttagagacagagcctcacccacagaccttcccgccctgctgcaactcccacgtctgctagtgtatttggttgtcacaactagcggtgctactggcataggggacagagccttttagagtcccagggttcaagaggagaagggagtgtccaggggagaggcactgagccaattgtccttccagcaagagatttattaacttcagcaggcagacgggcaacacagcatggcggggggtctgaagcagtgagtttccggccctcttagggccgttatgaagagggatcagaggtgttgtgccatagacaatgggtccaaggtcagctgatgtcaccagctacactaagagacattgtgtgttcttgtattcctggctgggaatacagacatttgtgtttatatacaatcttttattcctggctgtcccacagacatttctgaataagggccttctagaagaacaatgggcctatctcacatgcaatgagaccatggtcacttgtcctgcctgtaatctgtctccatttagagagcagtggttctcaaccttcctaatgctgcaaccctttaatacagctcctcacattgtggtgactcccaaccataaaattattttcactgctaattcgtaactgtaattttgctactattttgaatcataatgtaaatatttttgaagctagaggttttccaaaggggttatgacacacaagttgggaaccattgcttctaatgggtctggacatcagtgtagaggtgacttgacaatttgtgaaagttatgagaggggaaaggctatagctagtgttgccaaacttgggagtcagtctggaccccaggttgagccacttgtcttcaagaagtcattttttttcatgtgtgcctgaatgtatgtacgagtactgtgtgcatgcagctgagggcatcaaatcccctagaacaggggtttcccaacataggtgctgggaaccagatctgggtcttctacaagagtaacaagtattctcagctattgagccaattccccagccacttgagaagcccgctgaaacagcccaattagtagtaaaaacagaaaagggagatgtattcaatgtagccacattgggaaaacggacagagagatccggtggcacccgtctccagccatctccaggacagccatatgcacatctaagcagttagtcaaagtcctatcagtgtctgggctcacaagttattagaaatgtgtgaaccaccccaggacacccagagctacatagtgagaccctgtcttgaagggaaaaaaaccttgaatgtgtaaaatcatttttctaggagacaagcaccataacccatgctttttccttctgctaacatgaaattcctagggaaatcccctcttcttggagtccactgttctactagtctgtagtcagattgagagacaaacatcatctccttagaatctcctcatttctgccaggcttgttatacttggcatggactgttagcgcttctctttgtgttgagaggggggagagactgtggctggagggggatgggttctaatggagaacagtcacactctgaacactcctgagagcacaggacagggtggcatagcaaagaattatccaaattccaatatcggaacagatatgctcagatgaagcctggcctcctgaatggtgctatagatcattggggtcattttgtgtattatagaaaaatctgtctgggtccatgggatggaaaatctggagacgttccagcccagctgctggcttacttgctggcccatcagtcagctcaaggacaagcctggcatatgagacttcttgcctgtccagtcttatccctcactgctcctgtagtcagtctcatcttcaggcagcttgagttacttgcccagggagacacagctactgacctaataacatttgctcagtcaggaaagggcccagtgcacatgagaacggatttctgaatttgatttaggcagcttctctgaccctgtagttacttctaatgtactgacactaggtggcactctaagtccaggtttgcattgattactcagtcatgtgaaacagaggcttacaggtgcggcgttagctttttttgtgtgtggatgcaatatccctgttaaacttacagctaataaactccttagtcatcagtctggacttgtcagagacattctttgtgttgttgtctccaattaaaaacatccacccacaaaattcacatagcaggtgcacaaaattcacagacattaagaagagggctgcccaggggtccagtgcttgcccaagagtggttgctcccttccaaaagccctgtccaggaagcaggggctttgacatccccaggagtttgaaagaaatttaatctcaacttctccaagcactgagtttgtttgcaatttgacaagagctccaggctgcttggtcaggtttgagaaacatctaagtacctcagaatctttagtgaacaccttctagaaagcttacaagccttacagaactctgggaacagatagaaattgtaaatgccctcgactcaaagaggagttagagggatcacggtaggcagggaaagcaaaggcaagccccttgaggtggcagcttcttgttcccagagacactgcaaagagaaatggtgggaaggcacaggggcaggtatctaaacaggttcaataagggaaagggaaggacccaggggccctatataagacccaagccagcatcccactaacaggtttcctgccttacacctctcccatcccaaagggataaagctgttactgtgcctttctcaagtgcttgatcttctgtctttcccagatagtcagttcttttcttttttaattgaaaaaagtcttttgtcattcaatagatttgtcattttgtcatatttttctcctctcccaattgttgccagatcttccctaactccctgcccacccaactttatgttcttcccctctctctctaaacacacacacacacacacacacacacacacacacacacacacacacacacggtgagcaataacttgggagaaggagactcttctgtagagctggacagggaactccagggatgcagttttcatgagtcggtgcctacactgacatgggctttttggtgatgcaactgccttcaagtcacccatgttcctagaagtagattcttaccctaataaactcaccggtgtaccaagctgtggctttggggtactctggagttataagatcctgggatgtggtaacttctgatgtgtgtctaatttagttgagtggggagagtagaagccagtgtccctttaatacaaattatagccctcgttctttctgttcaacatggcgctgtatgtgcacataccaacagaacactttcctcccttgctcttaccccactctccccattcacagatcacagagctgacttactgaaggacaatagtaaggctcattctaaatacacttttactggtttggggtggttggtgttggggttgtgacttttctttttttgtgacttttcttctctgctgttacctctatcattttcttttaccaaagatgactttaaaaaaaatatgtgtatgtatgtctgtgtggggttatatgcacataagtgcaagacttcttgggggccagaagagggcatcagatccccagagctggagttacaggccctagtaagccaccaaaccagagtactaggaacagaactcaggtcctctgcgggagcagcatttattcttaaccacccaaccatcactccagaccccaggtgagtttttagaaaatgtgtttaaaggctgatagagtccttcttggtaaatggccttttgcatatcacatctgagcagatcattgagacctgagctgcccactggtaagtcctgagccaggcaagagctgcccactgctaagtcctgagccaggcaggccattggtcctaaatttgtgaagcacattgtgaagtcttcagaggtggacactggggctagagcagtcagtcattgttctttctatgtaaggggattgtttagtttaggaaaataaaaacactaatgttccaaggaagaggactccaatttcttttctccctctgggtgaggtctttaggtggaagcctgagccacatgaaacgacttcttgcaactccatggccctagaagatgccaaacttcaaggatcacacaacacacaccagggtcttctctctccaaccaaactcaacagagctcaaggtcaacatctccactatacacgggtgtgtgtggcgggggtaggggggtgtagtctctgattcaccagtttataccaccaacaaaagaagtttcctgaactaaatcctatgtgttgacccaggcaagtactatcagggtgtctaggaactaatgttttaaaatctttggtatagacctgaaatctaccaatatgagtattttcaatttctgtttgcctttttctttatttaaagttgaagccaagtatggtagcacatgcctataatcacagcagtcaggaggggcaggaggattgctgtgagcttgagcccaccttgggtaccatagcaagttccaagccagtctaggcatcacaagactatctttctaaaaaaggaatggaaggggagaggaggggaaggtagggaaggaagggagggaggaaggaagggaggaaaaggaaggaaggaagagaaaggaaggaaggaagagaaaggaaggaaggaagagaaaggaaggaaggaagaccagggtgtggtggccatgtctttaatcccagcacttggaaagcaaaagcaagcagatccctgtgagtttgtggccagcctggtctacatagaaggactctgtctcaaaaaacaaaacaactggaactattattatgaagctattattcccaccacaatgtgaacttgtctttgcccaggatatgattttacatgatcatagctgctagaacatgatgattctagcgagatgctcttaaaggattgttttaagtttttcatgtttattttttatttatttaatgtgtatttgtgtgcgcctggatgaactatgtgcatgcaatgcctatggaggcccaaagagagtattggatggcctgcagctagaattacagatggctgggagccaaccaacatgggtactaggaactgaaactgggacctctgcaagagtagccagtgctctttaccactgaaccatctctccagccccaaggttcatttttttcaaaagatttatttatttttatcttatgtgtatgagtgtttttcttgcatgcatgtctgtgcaccacatgcatgcctgatatccacagaggtgagaaaagggtatcagatcccctgagttgtgagccaccattatgggtgctaggaaccgggtcctctgcaagagcagcaagtacttttaactactgagccatctttccagatgtccccaccccagccaaagtagtatttcatcttcactcattcatttaacaattacttatgattattttctaagtagtaaatattactatgtttttgaagtatgtttgaagtatatagaaacaaagaaaataagcaatgaaaaactatgcacaataaagtgacattctagtaggttttgttttgttttgtgtcttggaactcactctgtagaccaggctggcctcaaactagatccacctgcctctgcctcctgcatgccagaactaaagttatgcaccaccacctcccagaagtgacattctaatcagtaaaaaacagacataaagaaggatctggtactgtaccacacacatgcatatgcacacatgaagaaatgtgcaggccctcacatgtgtgctcatgtacacacacacagacacacacacacacacacacacacacacacacacacacacacacacacacacttgtgcaccaggaaagacagtagaatatcttaatatattatggccaaggatcaagaaagagcttgccacccactcagcctctgatgaagtaatatagtgatgcataggtggcacccctgcccataaccttttccccaggaaagagtaccaaaaaggccacagatgtactctccatatcagtcacaattgttgcttaacaaaccatcccaagacttagtgaagtaactgtgttgattttggcagtaccgatataggaagggagagagtatctctgtttcataattgtataatttcttggaactctgctagtcccaaagttaggaatgacctgacgaatggggcatagaatcatacagaactctccactccctctccactcccacctgatagacgataaagggtattggcagcctggtgggctaccaaagacagctccagtctctccacatagggtggtttgtgcttcttcacatgtcggctgagttccaagggccagcatcccatgagagccagcatcccatgagagccaggcagaagtactcagcagcccatgatctaacctcagaaatacataacaataattccattgtgttccattagctggagctatcctggagtttgaaggataaagaaacatagattctagcaccggaggggtatccaggtcacacagtaaaaagatcacacggatgagaacacaccacccaggccagctttggaaaacccagtcctcaacacctttccaagaaagtctatctagacaatggctgatcctcccctggggccacccccactcagtcttactgtgtaagatctggtttctacaaggatgagaacaagaaactctggatggttggaacctctctgaccatcagcttctggcaggtgagcagattacccccgtcccccttctccttgagtttgatctgtctccacaggatgtggcagcaatattctctggtattatactggggacagactccatgttctggaaattagtggaccatatccagattggtgtcacagagcaactagtcctaaagctggaggactgccttggcttccagtttaacagtccctccttctctgctcagccctgaacttcagatgatccgcttctctgagcctggcctgcctgtgtcctgagcctttcaccttactgggtcctgatgcagctttcttgccttatttgtgcctctgatgctgacctcacagttggtccttctaaagacccctcctcccttggaacccctctcctgggctcccagtgcagcatgcccctcaggtgcctctgatctaaaggtgcctgtggagaaggtatggatgggaacttcatgccctgcggatctctgagctaccaatgatggctagaagttgacctggtgctgggcagaggactctgtgctcagtggcttgaaggcacaatgggatgtgtacagggagcatctggtgtacttctcccacatgctcagttcttggctcctagaagtgatgctgaccctaacccccgcccccaaaacttgtttgtttttaactaattaaactttactgcttttactttttatttttacttttttaaaaaaataaaagaaagtctctctatatctttgcagagtcattcttaaagttgagaggtaaaaccacacagcagaaaatgataacatctgagtattatgtggagaagtacagaacaaagtatcactctgattaatctgcccttatctctatagaaagcatgcttttgttttatttatttaatttaatttagtgcacttatttaaatatccaagctggcccctacctcctgatcctccacctcttacccaccagccccaacccccacctcccaactgctgggattaaaggcaggcaccaccatcttccagctccaccatcttcaagctgagaaccacttttaaatacctgcaacttctgacttatttacaaagaaccgtcagcctaggctagagtgggaacttgctctaactttagatcaagtgcccaagacacaaaggcagagaggtgtgggtaaaaatcacaagtgttttagaagcagagttctgaatttaatttaaaccctcactggaccactggccagcttctatccctgcacctctgaaaaatgagattaccccaagaatcagacaagacctgcaagcaccaaccttaggtgctagatgcggacagaatcttgatgtcttaaactacaggccaaactggaacgcttctatgacgttctaatctaccacaataaaatgcatttttatctgtattgctgagcatcttgttagtggcatgcctttcaaccccccacatggtgtctgtggaggaaacaatctgtccgtttctatgatactctttccgtagagagaatcagaacatctgagattcagacttatgatcacgggcacacagtcaatcagttcttggtggctaagtcaatgataagatgatggtgaacgctggctctgccctgtgatccaggtacgtactcctgtacctagtgtaggataagacatttggagagagactcacccacctgaggctgaatgcaccatctgagtgagatctggggctggtctgagctactgcaacgtgagtgggtagagagaagagagatccccaccactaaatcagggaccagtttaatccatagttcatctgtggttcagggaaggggacctcatactttgttctgggatgctttttcttggtcaccaattcaatgtctccaagggctagggggtggatggctcagtgttgcaatccttgcttagcatgtgtgaaatcctgggttccatctccagaggttgccatggagatgaggccatcatgccaaccgagagggacaaccaccactaacgtgaaaatcagactgtggcaaaaatggaactgtcaagatgccagatgtggaggaaatgagaaggctagctagtaaacagggagggagaggagggaagtgacttattctgaaactttgtcattgaccagatcttgggaactgagagtctgattgtgtgcaacactcagacatgtttgcatgtcttttggataagctctccttttatattcaagctccagctgacaccctctggtaatctgtacagggtctgtcattgtcccattcaagaccagccccaggcagttctagtggtggctcccagctagttgatggagccaggtctcagactgaggaatctgagttaaagtcacagttgagtgactttcgggaagcctcatggcctctctgagatgtcattgcctgttcattagggaaacattcctgctcagacgacctctggactttcggatttatgttctccagggaatcccctaaagtgataagttccaccaaggcagggaccatgactacctgttcctgatgtttttctagtatcaggcactagggaaataactagttcttggtgcataatgggatgatggtgaacttagtgtctgcactgtgtggaagataaaggcggcaggctcttcaggttttgttcatccccttctctaggacattggtcctcagggtgtgggctgtggaccactacaccacacacagtaccattgccaccaggaccagtacctgagaatttgctagaaatcaaaaaccacaaccccatcccaaacctactgaatcctaacatttgggcttgaacacacattgcatttgactaattctcactgaagctggagaaggagtgttgttagatacaccaggaagcagatgggatggtataagataccaccttcttagggtccctacatccacatgctcaggtgacactgctagcgccttctatgacctgttcagggcaggaagcgtgctgtggagactagcaggggactgaagagagagaaactagctccacccacccatacacatacaagcatccccactggctgccaaccaggggatggctgcagtgccccttcctctttcagcacaacctgcagatgcttccagaggatctagagataagctctacttactctcctccaccctgagcagcaggtaccagagagctttggggtggcccttcccgctcccagcagcttcccagaaccccgtgaatgccctgcaggcacagctgaatggttctctcctcccactcctgccctctttcccatctcaagagtcaaaagggatgggggctgagatgagcactttcaataagagctggcccctgtcctgctccatgtactctgtgggaccaattcatgctatacacctgaaagcagctatttacacctgtcaaaaaggagggggatcaagggttatatgaggagctagactttgaagatgtcaaaacaactcaacagaagtcctacactagtcaggcatggtggctgacacctgtagcaagcatttagaggaggatgagataagtgggttgccatgagttccaggccaaccaagatggcttggggagggggtgaaaaaggggacatgggaaagggggaggggaggggaagggatgggagggaggggaggggatattacagtatctaaagtaacactgggagacagctggagtcacacggagggtttccactggaggtccacactgtggcttactgccaggaagagcatgagggcagggtgcaggtcatagtgctggaaactatggagtagggagatgatgaatccatagtgctgactgtcgtcagttctgggggagtgaggagggaggcctctggagaactgggggacagttggagagacaggagatttcagtctgactacaagataattctagaaaagctataggaaatgtgtctttgaatatgcaagcaactgagtagcagagggaagcctactgccaggtttttacatgggcaaccctgttgagtctgcacaaccactccagaaggcaagtgcactgatcttgtgactctcactttattaaaagcgaaacggaggcacagaggggcttggaccctggtgaaggccaggaaacaaataggcggtagaggcaggagtcacgcctgacctgtctgactcggaagcctggactcttcatggcaagtgtccctgttctccagaaggtaaccagggcacagaaaggataaggcacttggccaaagccaggcagtgaatgacactgtgcgccagaattagtcacagactggaaggtttagctgcctggcaactgcccctcctgcagacattcctgttcctgactgcccctggcctatgcactggaggggcatgtcacacatgccatgaagtgcttactgggcaagacctggtttatttatgtaacctgagatctgctgactgaaggaaaccagtgcccacagatggacccatgatatagatcaaacactctcctaggcttcatcattcacccaataagggcagcacagttgagatttttaaatttccagcactaactaaacacttgctgcctaccaagggtctcctggtgctcctttagtcccctggagtaccaagccaggaggatgattgtcaattctagtacctggtctgcattgacagatgcacacatgcgcgagcatgaacacacacacacacacacacacacacacacacacacacacacacacacacacacagaggcacatgtgatttatacaagcaggagcacacagcacatgcatgcttgagccaagaaagtttgaaagacaagtccagacagacatacacaaagaaacagacagaccttcattaggcccctgcatctcactgttctaccaggaaattcaaggtgcagatctttgatacagtaacaggtgccaactattgagatgaagatttatgtgtaaataatctgtttcaaattgtccccccacccacccagaagcaaccataaacgaatgggaaaatgaacctgggagaagcctgagagcatgtgaactattaggttaccttcacaaaagcctggggctgaaccctgctcaggtctctgggaaacacagaagccccttcttgaggcttgattcataaaagtaagggagaaagcaactactctacaaatttcaggagcctcccctgaaccctgcatacaatggcaaaggcagtctgggctcaagtggagccttgcatacatgtcaaaggcacacccaaagtcgtttattcaaaagccatcacacacacacacacacactaccctgacagggacacaaaatcagcggaattattttaagtagaccgggaatgtgatctgatcaacatttgcaagcgatccctccagatagaggttaagagtcaggaagtagggtgagctgcggcagcctggagcaggagtggaggcatatgagctcctcccgagtcccaggcaacccacgatgtggttctgcgtagcggaccattccagcaggggcaggaatttaagtaagtaaacagaaactaccccttgagaattgagaggctggacgagctgggagagttggtgcctgaagcacaactccctgaagttgtccttggataaggaaaatgagggctctgagcccacagagtgaccctcagaggcaggaactgaccagggaggtggcaagggcggaaacgtttaacacaactcaagacttagatttcccactcctgtaggcccgggtgcatcctcctttgtaacaacgcaaagcctctatgttacaaaagaaaaaaccgaggccggaagaaagcaggacgtccgcaagtgcgcttccgtcctggtacggaagagagtgcgtctgacgtcatatgtaggcgccggcgtttccgaatgcgacggaggctacacgtgagccatggatacaccgttgaggcgcagccggcggcttgaaggcttaaaacctctgtctctagagacccttcctgaccccgcagtttcccgagcgagacgggcccttctcgagtttgagtcgaacccagaagaaaccagcgaacccaagtctccgagagtgcagccactggaaacaagtcccggatcaccgtgtctgaaacaggaagcaggctttgggtcccctcaaaggcagccagagcctgaccccgggtccctgcaatctcagcaagatctgggcctggggtcacctacagaacagacagaatcgagtccggaagccccccaacgagagacgtcatccaaatctcttcccacacaaggagaactggactcagaggtggtacacgctaaggagttgatcccaggatccccagagccttgcccgggccagcaagcaccgggtcccgagccctctcagccagtacaggagctgacatcccagacacccagcttcccacagcgccaacaggaaccaaacaagctacctccagctggcaagacggtgacaggtggcctcgacgtaaagaaacgagttataccttctccccaggccccggcacccaagaaattgaaggaggaggagcttcctgtaatcccgaaggggaagcccaaatccgggcgcgtgtggaaagaccgctccaagaaaaggtaaagtggcgagtgggggtagcatgggcgatgggtggggttatccgtgtgtcggaccctgccttctcccgaatgctatcccagggttgggagagcgcttatcccagtgaagttaacaaacatatcatagtcagaatgagggagcccctcggtggtcatttctctaaggttgtctgccctcaagcggggttcttttgaacttcccttccatcttttttattttgagacagggtctcattgtgtagcactgcctgtcctggaattcacggagatctgcctgagtctgcctccttagtgctggaattaaaggcatgcgccaccacacccggcccttcaatcctcttgtccggagttcagttccaaaaatatttactttgtctgtcacatctggtgaaggaggcagaacaagaaaagcacccattgcttggacacagcgaagtcctttcctctgttgtctgctggtgattgtctttgataaaatgtatcaccagacactggttatgtagcacttttcagtagggacagagggaccaaagggagagtctttgacacccagcagcacatgtaatcacatttaatctttatctctgccgtttggagcaggtgttactgttattgatgttgtacatgtgaggaaaccaaggcccaggtaggctaaaggagacacaggatgtgagcatggatttgattacaaagcatgtgatcagaacccattaacctgcctctgttgatctgacttgactcaggttgcagccttcttaaaacaagaaatcttccttgtcctttcagtgctggggcatcataaatgctcaattcatctctttgggtgaaggaatgaggagtctcataaggaaaaggcatcattagggaacagcagagaagtagtagtggggttacttgaaatttctgctgggggaaggtgaagtagggttctgttgaaatttctaccagagacaagaatttgtaacagaaagggaacctgacatgggggtttttagagaaaatgacattgactgggggtggactgagccaggctttgcacaggctcttcacagataccattttgttatagtcttaaaccctaggcactgggtattgctcctcccccatgcacaccccattaaacagaagcaggtgaagcttagagagaaaggcaccaatcagaaattttgaagcatccccttttccctgtgtcagcaagtcacagtagccaggcaactgatggccacacataaacagccaaagaggttggttcaggctggcaagagagtgactgagctagctgagttcagtgtagagctttgggccctgcactcaccctcagatggggagggtaggtttactgagtaagaaggggctgtgatatgctgagtgggaagaagaaaagaaccagcagagctgggaagtaagcctggaacactccaccagtaagggataggaggatacttggtcccagctctcccaagctgttgccactctatactctgttatctgcacacaggagggtgcaatggctgagaggcttccttgtgcagggtcacacaggcagtgagtgatgggctcaggaccaggcatctaggcctgtcttccatctccagtaactggtgctgtccatcagcactgtctcagtactttagtgagttcaccagccatgtgtgattatttacattaactttattgaatgaaataaagatcctcttgagttttcttaacatggaccacaatttaagtgtttcagcagcctgtgtgtagtgactccctttcaagaaagatgagatggggaccatttccatgatgctgctctaaaaagacatagcatcatgtcttgtggctctgactcctccgggcttccatcatcttgttccttctgggttcttgaatctcagattttaagggtaagaaggaagtctaccacagacccactgctctgtttttaggtagtggggtcttgagcaagcctctgtggacctggcagggaaggatatcagaagttaccagtgcagtggggcagggtagaaccagactgcttatgaataagcctggggccaagttccagactatgagtgtcagggagcagacctctcagaagagcagtgttgaccttcatctggtcaggaacagagtgcccagcatgcacccagaccttcagagacagggttgcttcaagataccctactaacagacagaagtaaataggaacacctgtgggagtcaaagtcgaagtgtaggaagcaaagggcaccatgaaaggatctgctgaggagccttggagttctaggggaaagaacaagaccatgggatgcccagcaggcttggcaggtgatggaggaggaagcacacatggagacttgtcctcattttatttttactttttatcacggaacttttgaatggtacagaaatgggaagagctgggttttatgagtctcaccaccagtttcaatagttctcagcctttcctggcccagcttcattgccctgcactttaccctcctagaatgttttaatttaactttaccatcctaatacgttcttacagaagtcacctccattcttctatggctcctaagaacatttgactctgcagaaaagaaaagctgaaatcccctaatcccactcctccaccttcacctcgcacccccacatccccccccaagctgggaaagaattagaattgttacagaaaagcacccttgttcttgctgtttggaagtacagccacacccctgtagggagggagcatctcattttcagaggtattcactcacgggttgccatgtttggtggcaacaaaaccttatagctgaggacatgcaagcacagaaaagttcaagtcccaacctatactcaggaacaagaagactctaggagtcttggtttgttcctctagaaatgggaagcccaagcccacctcagagttagagccacgcacttattggtttgtctgttccatcctgagttcctatagaaagctgaatgccaggcaggcaggggaggccaggaagcagacccagagctcagtgagagcagagggtgaaggccacaccacagagatcccctaagtgcctcctttccttccaaggttctcccagatggttcaggacaagcccctgcgtacctcctggcagcagaaaatgaaggagcgtcaggagaggaagctgaccaaggattttgcccggcacctagaggaggagaaacagaggcgccggcaggtaacaggacatccggccaagtctggatcatacatgccaaatacatgtgtgctgcaacagacatggctgcaggattatgacttactcagagccctgggcatgagggtcccagggggaaaagagtggtctagggccatggtagcattcccactgtaccatccaactcaacctctggcccaaggccatgcaggagacctggaagtagaatgaggagcccaagatgaagaccaacaagccatcttggtggcaggagtattcaatgtacttacaaggaaaaagcttgtctcaaatttgctgctgtcattttagaagagactcctatacaccattgcctttcaatccacttctctggtgcccatccataaccaaaaatgtccttgtgaaaggttcatgcctgtgagctagggacatagctcagtggtagagcgcttgactggcatgcacaaggtcttgagttccagcaccacagaggcttatttccagcaccttcggcctccaggaagccttggaaagagccccagtaccacttcaacaggcagtactgagaaagcaaggtcatgctggattggtcagcagcactgtccccagcatcaagttcaggtgtcactactagtctgaagagcccaaggtgtagaaggaacacggatacagtatcaaacaacttgtctcagatctatggttccagcttggccactgagaagagggatgggccggccactaaggcatttctccaccttgctttgagtcactccagatctgtctgttactgagccctcatctcttttcctgtacagccttagctccctctcgggcaaaacagttgccttctcatgagcaactggaggtacatcctcccagctctcctcctaatacataggaacaaaggtctcttcctccccaatggcccaatgaatgactcaaagttgtcaaagccacaaaagccctgaccacatagcatttagtgttggagccatcatccctgtcctagccctgctagtacagtagcagcatacctgggaagccctgggcttcccatccccagacaggctctgggtgttcccagagacccggttctatgccaagccttgctcacacacttgtttctctagtcagttcctgtggtcagccttaccatagaggtgaggaagtggaagcgtagacagtaacctaattagaaagaagcagaaagaaaactccaactggaccaggttccaggttcttccatagccttttgacagctcaacctgcccaaccctacctgggatcaggtgcagagcccagctatattctggccttgcattctcattctggtccacctgagcctgggcagaaggaaacctgggaacatagcataaaggagggaaccagcctagccctctccctggcagctagtgcatgggatggtacaagaggcccttctgcctgcatgtgacttctgggtggggaggcacccacatctgtgtaggcccctgccctcagacatctgtttacccacctttctaatttagaatcaggttctcttgccacagtgggcctcagctccaggcctacagcataggcattgtaccccattgttcttccccaggagtgcctaggcctccacccctccccactaggaacaacctggaagtccaagcaggcttctcctggttgtgccagtctcaccagggtcctgagatactagcaccaccccctcacccctcactccagcccccagctcctagtgtgagatccccttctgtgtgtttcaggagaagaaagagcgccgggctgagaacctgaaacgccgcctagagaatgaacgaaaggctgagattgtccaagtggtgagtacacctgtgcaagagatgcaggctgtggccaggtgaaagaggcctttaaggtgcttgggctccctgcctttcatggcccactgtcctgctgcagtcctggccccagggacagacatagggtcctcagccacactgatgcctcctattcccttctttcccagatccgaaaccctgccaagctcaagaaggcgaagaagaagcagctgcgctccattcagaagagagacaccctagccttgctccagaagcagcccccccagaggcctgtagccaaggtctgagctcaggacagcctggagcctccacaagccaagagccacagcagacaagccacctctcaggccactgtcagacatctctcctggcgccagcacaccaactgtgttgcattaagacagggagagcagcccagagggacctcacagggtctcaggagagatttagctgcctccatctcctttcaggtctttgccaaagtgccttagggtagtggtggtgcacacctttaatctcagcactttggggggtgggtggtacagagtcaggcagatctctgagtttgaagccaacctgatctacaaagttccaggacagctagggctacacagaagccctgtctccaacaacaattaaaaagaaaaagagaaaaaaaaaaaaagatcttgaactgtgaattcgtgttcttcagtgagctgtaactaactccctgtctcagggtcctgggtctagtccatacttggaggtctgatgtcacaagtcagtgcccccattgtcccaaaagccagccacctgttctgcaccttctgtcccctctgctgactgaaaccagcccctccctgtaaagtggggaggttgcagaactgggttcctctctagcacccgtttcccacaatggactgtagccttaggacttgagccaggcccagctggtcttccacagaagcgtttattgatgtctgcacaagtacagtctggacttccaaaaagacacaagtccctgccccattggactttcattcttacaataaccaattaaaatgcatggtgtaacaggtgtgatgtgctctgagtaaagcaggagggagtagagagtgacattttactgtccagtttgagaagcacttgccttgggcttgaggcctgcttggcactgagaactgacaaccagcctggccttaagtggttcgggagaggctgagaatgtctcccctctgcttttcacatcaccagtttagtgacatccaattccccttcccctggaatggagagatgagtcacagctggctgtcctgcagttgatccacggtggggaagacattaaatgagtgtggtgcaaggtccatggctgacacaaggtgcctgccctcctacctgcaggttggaagtgatagctgccaggccctgtcctgtgagacagctgtaatactgagggtagttggaggatgttttctctggatagacttgaacctgtgatgctgaaggctagaatgcaggttctagcagcctcagctctgaaactgggcagtgaagatgcctcactgaaactgagctggagttgacacacctataaggctagcaagctgaccagcaaggttgtgtgatacaggcatctggttcaaaggccaactgggggttaaaaaatgaaggtagtgggctgaaaactgcttctcaacccttctcccactgtacccccagatacactgttgttcattggcagagcctgctccccatccacaaagcagtgccttaatgacatgtgggctgtgagtttaacctgtatgactccaattgtccttggggcagctgcctgggaggtattagaagtacaaaatctcattcccaccctcatcagctaccctagcaagatccttaggagcttcaaagtgtaaaatcccgggtggccagtggtcaggaacccggtaactccttcaaaagccacttctgcacccttcggatcctcttcccagctccacactgccagattaaaatgtttaggagaggctgctttctatttgctttgctcctgaagatgcagtccacaagctggttcacctagcattggctatgtacattttcaacagagtggcgagatgccatggggtgtgttggtgtgccatcccagttatgcttgtctaatccgaggtggagctcagagcgtggttcagtgagccttgcttctccagggactgcactgggactctctgctgggactctgtaccaccaccccgcatccagcggatcaagcctgaaggatgcaacgggggaaggcggcccgccagcaggagggtggaggttgaggtggcagtggaggaggcacggcggcggcggctgccagacccaccactcaagtcgctgtcctccaccaacacgctttcaaacaccgccagcagggagcgctttagtttgtgcatcatgtccggacaggtgagcacgtaaagcaggggattgaccacactgttgaagaaagccaggctggtgacgaagggcagcccacgtaaggcgaggtgcctttgcgtggtgacagcctgtgcatgtgcctccagcaaactgaagacatggtagggcccccagcagagcacgaaggccgccactatggccgccaccagacgcacgaagcggcctgtcctctggcggccgcggtggcgcagttgcaggctcacggccacgtggctcaaggcaataatggccagaggcaccacgaaggccaacaagaacttgctgactgccagggccttctggcggtagttgcatgtggcctcgtggtctggccccgggttcaagagcagcatgttgtaatagcacatgatgcggccgtccagcctcgtgatggtgtccctgaacacaaaatagggtactgtgtttagcactgccagagcccagagcatcaggcagactctgtgcgcaaccgccaccgtgcggtggttctgtgcccacaccggccgcaccacctgcaggcagcggtccaggctgatggcgctgagcaggaagccgctggcaaacatgttgagaaagaagaccgaggaatggaacttgcagaaggtggtacccagctcccacgagtgacccactgccagatagtaggtgaagaagggcagggaggtggaggctagcaagtcggatagtgccaggtgcagcacccaggtggtgaccaccgtctgctgcatgcgacagcccaccacaaacaggatgagtccgttctccgtcacacccagcagcgctgccagcccatgcagcaccaccgacacgtggtcaatatagcggatgctagagttgctgtggcttggaagctggatcatctcctccaagagtggacagagcagcttctgtgtgatgttggccatggtgagatggaagaaaggagagctgagcctggtacccgggaaccagaagcctgcagcctgggcaagagaggaacctatctcagagctgccagtccggcctggcaataggatagacactgggaatcagtgaggctgagcaaggcaagatactaacatcccagctgccctcttcccccagtgcagttttgggcaagcccagtgtagccttcctgagcctgtgtcctaacattactgtctctcctagcagtccccagcttggatgactactggaacaacaaaatgaggactattgaaagagtgtgaggtagtcaggcagtgatggtgcatgcctttactcccagcgctaggatctctgagttcaaggccaggctggttggtctacagggtgagttccaggacagccaggactgtttcacacagaaaccccatctcaacaaacaaacaaagcaaaaaagggtatgcagtagatgggacaaatagaagaggatctaaatttgctcccagcacccatatataaagtagggcatggtggcatatgcttgcaatcgcattgctagggtggtaaaaacaggtgggtcctgggggctcactgaccagccagcctaaattcatcagtgaaaccccaggtcccagagaccataactcaaaaagacatgggagggactagagagatggctccacagaaaagcacatttggcttctccaggggaccagtgtttggcctctataggcacctacacacacacacacactttaaaataataatcttttttgtttggttttgaggcagggtttttctgtgtagctttggaggctgtcctgtaactcacttgtagaccagtctgatcttgaactcgcagagatccacctgcttctcgagtgctgagattaaaggcgtgcaccaccaccacctggctaataaaaatctttttaaggttttattaactgctccttaagcaatatcactcaaggttgacatctgacttatacatacacatacatattcctacattcatgtgcacacacacatacacactttaaaataataatctttttagaatgactgctcctaaggaacactcaaggttgacctctggcttacacacacacacacacacacacacacacacatatacacacatacaaacaagggaaccagcataaagcaggcactgtatcagtaccattgtgattaatattaagaacctgtccaagatcacaaaggtcagaccaggcaggactctttttcctgatccccagaacacagagggatgggtgtggcccctcatatgagatgggaggtctgtatcgcccaacactccaagccttacctggatgcagttcctcctagagagcctgtcttctcagaggtgactgcttgggtgtgtttgggagtgagatcaggggagccggcccctcctctgatagaaggagaggaaataagataagagagataagcgtgagacctggctgggaggaacaatcacatgaggtttctggggacccagggagggcagcggcagtcctgtctgtcccaggaaacccatccccattcactcactcccacactcggccaatagccacattgagcaacgactcaggcgctctggaaaagccggcttctatgcacgctcacagcctcatggagaaacccagggccctgtgatgaagctggagtcagggagcgctgagggaatcaggttgtggactctgcagaaggcgggaaatgaaagcaggctgtgagaactcaggttgtgccaagcacccgtgaccttccagggaatgtaggatcctctgatgcttccttgtggctctgtccttcctagggtggggttctgggacaccaacctagaatttccctgacaggatacctcttggagctatgtcagcaggagcaggcagactgcaatctccgaattcttcctgatccttctttctaagctttagcatctacagagcaatcacactcgtcttaatccaatgagagtagctcttgagaagaggaaactgaggttcagagaggcacagcagctgggccagtgccctggaggaagactgaggctctcctcccagcaagcaggtgcgagccactctctctgccctgggatggtccctgtcagctgtagtgtccatatcatgtgggatgctcagaggacaatgccgctacattcctgggaaccacccagtgtaagccctcaggctgcatggagacattgtcacgaccctgctgtagtgggaaccccagctttgcaaagtcctgagcttagatcccagttcctcagcttccagctgggtgaccttgtcagttcctctaagcagtgtcactgtgtgaccctgtccccacacctgagacggctgtgcatgatggccatgagtggacagttcaccattgtgtctaccatctagctagcattccttctgggcatcagccctcaccaggctcctaagctcatccccctgtcatcctagctaggagcagccctctctctagtcctgagagggcaccaaggcttcccagccccaaggagactgactacttaccaagccacagagtaagcaagggttgagccagggaggctagcagctcctgaaagcagcaagactgggcaccaggcaagtggcaggagaggaatgagctgaaggaggaaatagctatcaacccagagggcaggggcggggacactacattcacaagcccctgatccaccccttctcatcgtggaggattctgtaacccacaggacagtgtaagttcatgactgccaataccctgacataaatgtcctctgtggagaagcactccaggtcttctgagcttccaaagcagcataggtccctgcccctagggaacagaggaagcagtgtggggccatgggaagagtgcagagacccttggcctggaggtcggttgcttccccttgctgggtgctgtcgctgtgaacaggagcaaagtcttctcacagcgagtggtaaggtgggatgaggtgggccacaggaacacctggcacatactaaatgctgacaaaagcagcttcttccccaaccacagaaaagtggcaaacgtgagggttcttatggaaaatagacccccaagttcaaggtaggagaaggttgagtgtgtgtgtgtgtgtgtgtgtgtgtgtgtgcaggtgaggatatgcatgcatgtggaggccagaggacactccagctgttgattatcaagggtcattcaccttgttattggtgtgtgtgtgtgtgtgtgtgtgtgtgtgtgtgtgtgtgtgtgtgtgcgcgcgcacgcgcgcgcgcgcgcgcatgtagtatatatgtgtgtgcatgcatgcatggtggtgcacatgcgtttgtgtgtgtgtggagaccagagatcaacatcaggtgctttcctcaatcatcctcccccttttctttctttttcattttttaatcattgtattttatgtgtacaggtatgtggcctgcatgcatgtctgggcaacatgtgcatgcagaacctattgaggccagaagagggcgtggggtcccctggaactggagttacagacagttttgagctgacaggtgggtgctggaaactgaatctcaatcctctggaagagcagtcagtgctcttaaccactgagccatcgctccaccttgtatatttttaaaaattcatttgtgaatgcgcatgtgcacacctgcatgaatttgtgtgcagagcatacacaccagtgccagcagaggacaaaagacagcatccgataccctggaactagagtcccaggcagttgtgagctgtccagtgtggatgctgggatctgattcagacactttgtaaaagctagaccatctgtctggccagcaaattcaggtcctcatgcttcctcagcaagtactttatcaaccaaactctccagcgcatcacctaagtccttatctctccttggtttcttggagccagaaaccttccttcaatttcaacatcccatacccaacaaaacatgtgacaaagtcagtgtccccagattgtggcaagaagaccttgctcactctggcctccacatgcatgcatagacataggttcttagacacacttgtctaaggcatatgtcagggttagggagtgaggacagtgctatgccagcatgcgtgttcctcacagtgcctcaagacatgggtcagcaagggccttggtccagacccttagccacacagaatgtttcccttcccctgggccatgatgctcacagtccttcctaaaagtgcacagacctccacactctcaggataatgttcatctatccctgctatggcctgagtctggattgcgcccataggctcatgttttgatttccagctggctgtgcagttttgggggtgtggaacttagcatgaagaagtaggacagtaggggcaagactttgtggttagatccattccctagttcctggctcatactttgattcctgttccagcatatgagcagccccccaacacactccagtgacttgaactgctctgccaggcatttcctgccatgatgggctgaagctctctaaaacatggaccaaaataaaccttccttcccttaagcagtcatgtcatgtatttagccacagcaacacaaacgtaactaatatgctgcccaacctacataagcatggacaaggccataacgcagatggtgtggtggttaggtcagagtggccctaccattccctagctatgtgacctggagtgaataactccatagcagtaaaatatgactcttaaaaggtcttcctggggccaggcgttggtggtgcacgcctttaatcccagcacttgggaggcagaggcaggtgggtctctgtgagttcgaggccagcctggtctccagatcaagtgccaggataggctccaaagctacacagagaaaccctgcctcgaaaaaaaacaaaaacaaaaacaaaaacaaaaacaacagcaacaaaaaaaaaggtcttcctggaagccaggcattggtggtatatgctttgatcccagcactcgagaagcagaggcaggtggatctctgtgagttcaatgccattctggtctacagagtgagctccagaacaggctccaaagcaatacaaagaaacactgtctcgaaaaaaacaaaaacaaaaaaaatcttcctgggactggagcaatacctcagcttccaagtctggtatccagcacttgtctgaggaggcttagaaccacctgtagccccagctccagggacccagtgccctcttctagactcctcaggcaattgcacccacatctgcacatggacacgtgcacactctcacgcaggaaaaattaaaaatgagtcttctcaaggtcttccttatgcctggccccaaccttcacaggagttggtgtgcagtctgctgactgaactaagaaagaattccttctttccctaatatacatatctcagcaccaaggcatgaggcctgtacagacttccctcaggatctcagcccacccgagtcctcccccgagagcctgcgtgcagtgaacatcctgcacagattcttgtggcaaccatgttaaggggctttctttccagataaaagtctttctcccctgacttttctcaattctcactttaatctgtcatcaccctcatgtcttgcttcccagccagccctccctgaggatgtcttattgctaaataaaaaagtttctaagtactgataaagttacaaaaacaaaccaaagaaaaagaattccctggaatggatctctgaggcattttctgaagctgtgaagggcacgtagcatcttccccttgtcccagagggccttgagggatcctggatgattctgtgtggcaagaagcagcttctacacatgttctcagagccaagctcctccagcagaggtgtctggaaaggatgttggtgttctcgtgcctcatgttccttaccctagctagagtctcaggaactgattcaacattagccactccaagagtctttactgtgtgccagaccaatgggggtcctgggggccaggttcactgactgggagtaacaggcagaaaacctgactagctagatgtcctgcttagcctgagacaagggagagaaagaccagtcaagtggggattaggccagtttggaggacaggaggctgtcagtactccctgggagtgttaatgacagtgactggagccttaggaaggagctagcatagcacggaccaaagctcccccaggctggggagaagacctactctgtaaagtgttttgccacaccagcttgaggacctaagtttggagccccagaatccacatgaaaagctagacacatcagtgcacacctgtgatcccagtgctggagaagtggggacaggcagggttccggagcccactgggttccggaccactaggtccaccagcctagccaagttggcgagctccaggttcatctgaaaggcactgtctcagaagacaaatatggcgtgcatttacttacgtgtggatattagctgttacatcagtgataaccaagacaaaatacataaaaccacagagggtagatatagagtaagggactgtagggaatagtaagaaaaagaattgatagttatggaaggattggatggggctgccatgggaggatcaagggcaaagcagggaggagagagggaatatgaggagagacagctaaaataaggggcatttgaggaatggtatggaaatataatacagtagaaacttgctaaaatatatacatataagaaggtaatctcaaactaccaaataatgggggagatagagtcccaatagtctatctcgtcaccaaatgtagcttccagtgccaggactggttatatctaattcagttgttggccaaaagggccccactggaattcctaaacaacccaggagggtgccaagactataggctgctctgaacaaactgacagcaagcccgcattgctgatgacacctacacaactcattgaagatggagctgtcaaacgggtgcctacacagagccttcacctctatgtcccagcatccttggtacaggaagacacactgcacactattaaaagagaaacataaacaccaacccagccacaaactttttatctacaatggtctgctacctgtaagacatgctagtgcaatggtggcacaaagcttgtgagaggaacaaaaaacatttgattgaacattagtcccactccacaagaagaaacccatgcagacactacttggaggaccaagagcctgagactaggtagccagggacctagggtaaagccaaatactactgttctaaaaaaagaaaagaaaggaaaagaaaagaacaacaaataactcctaatggcattttatctattctcatagatcggtcttgctcaggcaacatcagaaaagcttcctcctgcaggagagacccacagccaaatgttatgaggagagtgaaagaccttggaacacttaggcctaaatgggatgtcagatcctgtcgctcagagctcagggaacctggaggaagactaggcagaaaacgtaagagccagaggagatggagaacaccaggagaacagggctctctgaatcaatggggcaaagctcatatgaactcagagactgagacagcaagcacagggcctgcatgggtctgcgccagctcctgagtatattgctatggcttccagtttggtgtttttgtgagattccttaacgtgtcaacaagtgaatctctgatttttgtgccttctcttgggctctttttcttctgttggtttgtctttttcaatgtgacagattttgttttatctttttttttttcttttgagacagggtttctctgtgtagccctggctgtgctggaactcactctgtagaccaggttgacctggaactcagagatctccctgcctctgcctcccaagtgctgagcttaaaggcgtgtaccacaatctccaggccttgttttatcttatttaattttgttatgctttttcaataaatgactgaatgactgactgactgaatgaatgaatgaatgaacgaacctaagtatctgggcctgccttatctgctagggtgtctgacccaggaggacttggacacagcctgggaatctgcatttctggtcaagttgggggaggggtgttgctactggacaggggaccacacaaaccacataaaggactaaaccactgtagcaagaatgtgaggccccaaaacctgtgttatcagcagcacgttagacaaagccacttctccccagccctaaaggataaaagaagtgatgagacaagtaagtgtttggtcccagcctggcccagagagaggccatgacagctagccactgtggttgtctcttggtgttgtcaagatgtggcacattggtgggactcagcctgcctggtggcatgactgagtggctatagctgccctgaaagagtgacagatgaactagaaagaatggcttaagtcagaggccttttgacctgaggggcagggttggtgttgcaaatccaagtcagcctggcttccctatgcagctaggggacaaggaggaggaggccttcagccccaccacgtgcccagttccatttttgcaatccctgacacctggagaaagacattgcccaccctcccccccacaccttgcctgttccactgccacaggtcctggtccctgaatgcagcactcatggtgtccatctcactgttataggactaacaagagcagggccagcagggccccaacaccctcttctgccatgcagaatcagagcctacggcttcctagtgcatgggaccatgtgtgaggtatggtccaaacacctagttggggcatccaaggccccccaaaatctagcgccttgtctccccagccccagcccctgcatactgttctccacactcaactattctacccttctccctgactcttgcctttacctggatcttgctgcctggaatacccacccatgcctgtggggaaaagaggctaatgcagcctcccagcagggctaggctccctccctcagggcctgcattaagaagcatattttttttttttatttcctttctggccacttttaaagaagttaaccaaagaggaagtgagatgcagccaggaaaccctaaatcttctagccctagctcagcaggctctgggggtgctggtgggattctacatgacatcttgtgggagaccgacagggaggcccccagaagctagtgtcaaccatggaaagagaccactacctcacatggccagtaaccccactcatcctctgctttccgtacccctccttagtcctgtctatcacagtcagcatttatcatcacccctgcctgctctgtactcaccaggccatgcccatgcccttgctcttgatgtttgtcccctactccggaatagtagtgcccctcccccaccttttggtgtactcctaatcgcgcttgttcaaagccctgcaccaaagttgcttcctctacaatatctttgcttacccttctagagaagcagatcccacctctcctccgtccttcccagtctttacctcactttaagtagccaccctcatcctctgtggtcactctctttggcagttgcaccgcaccctcatgatgaacaatatgagagactgttctcccgttcattcctaggctccaaagctgagcggggggcatgtgagagtcccaaggatgcctgctgaacagacaaacctccggtgctggaatctgtgcacagacccaaaggtcccaccagacctcaaagtggcccacacttcctccatccggtgggcctgcgcccagctcagagcctgctgtaactctgtctgctgcttgtgataagtacagcatcgaaaactaatgcaggacagacagcaagaaggaaaggtagatgtggctcggttggcagagcgcttgcctagcatgcctgagtcctgagttccatcccttgcactgcacacatccagcatggcattgcatgcctgtcatcccagcacatgggaggtggaggcaggaggatcattcctgggagtttaaggccagccttcgggggaaagaaagaggagcaggagcaggagcaggagacagaggaaaagcaggcaggcctaggctccccctcaacctaccccctgcccacatacaatttaagccacatattagttgccaagtgatgtcataacaaattctcacacacttggggacttttgatggtagatattattctccatgtaatctggaagccagagaagtctgaaatggagttgtcagaagggcccgacggctaccacaggctggactctcccagccatcctcctgtggtatcctcctgatgggggaaatacttctgtgtatgtttataaataaagtacttgcttggccagcaggttaggctggactaggagtcaaagaggattctgggaaatgtcgtagagaaatggtgttccagacaggaagtgacatagcaaggagactcatatttaagaagaggaaaaaggaaatgtcgctctcttttcccctcggctcctgctccagcagcacgatgtgattcaccaacaaggaaggatgccaataaggtgtccgataagataagtcccataaaatatatagatgtatggtaattgagactgagctaacatgagaatcctagtcattggccaagcagctttgtaactaatacaagtctctctgtgtattcatttgggcctaactcgggcgggcggctggcgtaaagcttgcacgtggcggtggggctcaggcggcttttggcaaaaagatttattgtaacatcctccttctgccactagtttgaattgagtaagcagagaagatgaagggcacagataagtgatgctcaactcttccagcaccccagttacgttggcttgttactgctggttgttgagaaagggtctcaggtagcccagggttggcctcaaactcactctgagctgccaaccctcttctctccacctcacaaaggctgggattacaggcttccaccaacacccctcttcttagtctcactttacaggttaggcaaccgagagatggcccagtggtttagaacaaattctgatcttccggggactcaagtttgattcccagcgttcatgtcaggaggctcactgccaccgtaactccagctccgtggaacccaacaccctctgctggatctgcaggcactgcactcacacagccacatgcaaacacgtacctgtgcacataattaaaacctaagaataaaagagaaagaaactgaactacatcctgggtctggtagcaagctcctttaatcccaatactgctgtgagttcaaagccagcctggtctacatggccaattcccaaccagccagggctacatagtaagactttatcaaaaaagaaaaaaaggaagaaagagagaaaggggggggagggagagagggagggaaggagggaggaaataaaagaagcaaagtgcagcccttaaaagtaaaatcacagggtgtgtaatggctcatgcctttaatcccagtgcttggaaggcaaagataggcagatctctgaatttgaggccagcctggaccacatggtgaattccagaacagcaagggctttgtagtgagatcttgactcaaataagccaataaataaaaataagaactacaggtcaagatgtctgacaatctgagtccaattccagggccctcaaggtagaagaaaactgatgcctcagaaggtgtcttctaaactccacatgtgtgccatggcacatgtgcgcacacatacaaattaattaactcctgcaatcccaacacttggaggcagcactaggatgagcatcataagttggggacttagctgagctatgcagccagttccagacaagtcaggggtacagagtggaatcctgtttcaaaaaaaccaaatatacataaatataaataaataaatttttagtgcgatctgggcatcatggctcatacctgtaatcgaatcactggagaggctgagatggaaagagcctcatgtcaaggccagccagtctataactaaataaagaaaaactcttgtagcaaccttgtgaattgagcactgtccctctaccatttacagaggagggaaccaagtcacagaacagataagagacacttccaacaacctccagttgacagttgagcagctggatcccctagtgcccaggagatttccaggctgtggaattgtaaccgggaattgtcttggtaccattttctcaaaggcatctgtgtgagtctgcttatcatggctgtgacaaggcatctgaaaaaagtcagctcatgaggaccaaggctttgccttttacctcactatttcagagctaccaatctgtggttcctcatgccactgtcctggcatagctgtgaggcagatgactgtgacagcaaaatggctcacctcgtgacaccaagaagcagagagaaaacaaagagactggagtcccaaggtccttttcaatgtgtttgtcataactcctgtttttttgtttgtttgtttgatttttttattgttgttattttgttttgttttttgaaccagggtttctctgtgtagccctagctagctgtcctggaactagctctgtagaccagactggcctggaactcacagagatctggagtgctggaattaaagatgtgtaccactgccatcacctccctgcccataacttccttctactccaccctccctcctaagggttctagtgtcttccaacagtgccacaggctggaaaccaagcctttggcacctgccctctgaagatcatttaaacaaacaacatctgcccgagcagtgagccagctaccctttcttctgcttcctgtttccatgggcccacagttagaaaacccctctctgggtattacttaattccaccctggccactactattcccattcttttttgtctagagagaaaagcggttacatgaactccttctcgtctctctgctcatttgtggcagtgaacaccagacaaaatccagtcttgtccaccccttgcttcctgcagacccaggagagggccttggaagaaagcagacctgctgccttcttcaccttggccttggtagtctcttgaactgtgagaaaataaataccttgcttaagcagccagtgtttggtgttccattgcagcagccaggttgactaaaactgccagaaatgtgtaatctaattcctgagtctaatggggaaaataccaggcaaatccatacagtcaagtagctagctagtccaaaagccaagagtgtgaatgacaaggaagacaggtggactgtcccttgcagagaaagcactcctgatcctggatggaatcccagcctaggaaacactgtcctgtgctataaaagtctgtatcagggttgggggaaagggctctgttgttaactggcctggcaagcccgaggatcttacttcaatcctgagaacacgagtcagaaatgtaggcatggaggtgagcactaggaacccagtgccgaggaggcctagacaagcaggggtgtagggctcagtcagcctgggtgacgtggtgatggtcaggctagagagagactttatctcaaaaagcaaggtaggtggctcctaagaatgacacacaagactgatctctggagtccacatgcacactagagaagcactctaccttctcaactacattccctactggagtactggatcttggtttttgttgttgctgttctggttggttggcttttgagatagtccctctctgtggagctctctctctggttatcctaagattcactgtgtagaccaggctggccttgaactcatagatatccacctgcctccacctctggagtgctgaaattaaaagtgtgtgccactttgcttgcttggttccacacccctactcttgaaatcaactttccttcacatatgcctgtatatgacagtgtatacatacaacacacacacacacacacacacacacacacacacacacacacacacacacacacacacttagtcactcacgtgggtctttatcagaacaaatgttacatgataaagtttatagattagataaatgagcttcaaccagtgttgatttcctgattttgatcagtttactgcagatacatccttttaaaaaaaatgtgcattcaagtaattagaggtgttttgtacagtctgaagagtggtctatgaatgaatgaatttaagtgtacagtaaagtaaaagaacaagcaatgtggagctgatgaagagccataacagacagcaaaacaccatcaagttaggcactaagagcatccagcagagaagactggagtagcccaaatgagagagagaatgcactagcatcatcaaagctggggcttagagatttccagtcggaaatgactggggaaaccccactgaggcagacagctggagttcccaattgacagagtcccaggtagtgcaaagaagccccacctggttgaaacttccaaagaaagaaccaattagcagcagatagctaccatcaaacccagcacttacagacatccagcagaaaccaactgcggagccctgctgaacagtcagtcgtgctatcattctgagcagcacacaccactctctgtgcatcaatcttttgattgaagaagtgcaccttcttttctcactgcagacatgttatatgatgggataagctgtgttgattcagctgcaaatagtttacggttttgctagtcttcagggtgcactgtttttattcctgggctttttgttggtttccttcctacttgtgagagttagaggaccagcctaacccaggtcagggaattttggaggacacttgacataaacgtgtttggacctgaactgggggagggcaaccccacttccagagccggcttctcagtgagatcaaatggcacagcatgtgacaatttaccaacataattaatgtttacctcaacaagaggtaaagaagaagccattgcaggactttcaagcagcacagaagaaaatgtttgtgcacacacacatagtgcacacagatgctggagaaaacagggcctagaacaaatgcaaacaagtggcataccactgtggggggatgctacacggaagttctgtcctgagagcttgcaaagcctaagattattttcaagtgaccagtttacaactgggaatgtggctcatggcaaagtgctcaccttgcactaaaacaatgaagtaaaacaaaacatctttcttctagaaaatcccactttactggctgcttttccctctctgcctcatcttctctccatccccatcctcctcatcctttcttacttaatgcgtgtgtggtttggggttgtttttgttttgttttgtgttttgtttgtttattatttttgttgggttgtgtgtgcggtttgtttggctgttgttgtttgacacagagtcttatatagcccaggctagcctcaaccttgctatataacagaggatgaccttgaaatcctgatcttcctgcctccttgacaaaagtgctggggttacaggtgtgtgcaccacctccaggtgtgtgtgtgtgtgtgtgtgtgtgtgtgtgtgtgtgtgtgtgtgtgtgtgtgtgtttactcatgcatgagtatgacatctggtagcctgctgtcttagtttgctttctgctactgtgataaacaccatgaccaaaagaaaactggagcagaaaagtttcattttacacttgcaggtaacagttcagggaagtcagggcaggaggaaaccatggaagaacactgtttatttgctcctcaatatctcacatgccttacttttttatgtaacccaggactacctgcccagggaacccccacagtggcccccctacatcaatcatcaatcaagaaaaattccctacaggccaatctgatgggggcatcttttcagttgaggtttcctcctcccaggtgactctaacttgtgtcaagtgtcaaaacatgaatgggcaaacctgctttatcagtctatgctgtaatccctttttacacaggtgctgggatttgaactcaggtcctcacatttgcacagcaagcactctcatccactgagccaccttcctagcccgtgtgtgtgtgtgtgtgtgtgtgtgtgtgtgtgtgtgtgtgtgtttgcatattcacagtgacccaccacaaggtcaagaacagatttccacttttgtcatcatacttatgctcacaacatttcagattattcttgcatttgaaatgttacattttcaaacaaaggatgcccacctgtgacagctaacgattaactggcctaaccccagagaaccctgaaaggtgctaccactgatctgtttgctcaccacccaccaccctgcacactgccagctcttccagaagctggggtcagatgggggcaggaagtaaccttgcattcagttcccagggtcccaaggcccaggacaggaagaaggtgaccctgcaggactgcttaggcaggaagttcccacacccatgagagactttggaagcacccagccagtagactgagacattcaggaatgtaactgcagtcctatagcctgcctgcaacctcttggctagaaattcctaggcagtcccagatgccacagagaaccgagtgaggggtcaagtgcagcttttctgaacttctctgatagaccaaggatggaagatgccttctgctgcctcaggagaaggaatttctccatagccccttgtaggctaagcagctgcccctgcaggtgactctcctttgccctcaaaggctgctacttgctacctgatccatataagggcctggctccccagctgatagggaggttctagcagttgtgggtatctgtagtgtgtgctggcaggagcctccaccatggcctggggttgctttggggccgtgcttctgctggtggctactcccctgagattgggtcagcagctacaccccaagcctggccttgaatacagctatgactgtggagtgcagggcatgcagctgctggtgatccccaggtcaaaccagactatccgattcaaggtgctgggtgagtactggcataggcctatcccaacttccatcccctgccccaagaccagcctgctgcaaggagggagctagacctcttcccggagccagagcaggaagagtagaggccatcccgaaggttgcagcagttagcctctcgccttgtcatcacccagagatggggaggtaaccagagcagaatttcccaggctctttgcacagggatcatccgtgagaaaggggggttatgactcaaaactgctgggctctgaatttccagccttatcttgtggctgcaaagctctcggcccacaaaccacactctgaattcgagagccctgaggagtgtgacttgatctagagaacagggatgggggactccgtgtgacaactgaatctgcagcctcagagccacatctgcaaagatggcccccaccccaccccagcccagcccagcccagcccagcccacccgccctgtgcactgaaagggaaaggtgaggggcaggcccacagggtgggggtgtttggtgcccctgtttggagctcacaaagtgagtgggcatctagcatggtccccaagacactgtaagagccacttaatatgacaaataagcttggtttttttactctgccctcagtctacccctaagaaaattctggctcctggggatctcggatgcctcagccaagatctgagataactaaacttaaactataaggcgttcagtctgcctgacaccctgggaatactctctaccccaggtacaaagagccaatgatcacttaaccccttgcagaagtgaaaaccagaaagggaaagacacttgtctaaggccacacagacaaactagcaagcaaaactaggtcctgcctctgcccagagattttcagaggttcccagcaacctctcactccccagtacctcaagtcctcctgcctcctctccctacccagatgaatttgggaatcggtttgaggtgaataactgctctatctgctaccactgggtcatctctgagaccggtgagcctgcagtgttctcagctgactacaaaggctgccacgtgctgcagaaggtaaggacagtcatacctgtaaggacagaggtagcttgtcctaacagctccctgtggtggctataagattagatagagcctatgatgggcagaggggtgggtaggtgtcagattaggtcctgagacagcacaaatgggctccctctatcagagttgctcagttcccattaacaccacaggcaaccactccagggctgggcggacaggccaacagacaggctccatgctctggcctctagcccagtgctcacctgaagtgtcaggtggccacactcagctgctctctaaggtgctctcacctgcaggatggacggttccacctgagggtattcatgcaagctgtactacccaatggccatgtggatatagcacaagatgtcactctgatctgtcctaaagcagaccacactggaactccggacccctacctggctccatccaccacacctcagccttttactcctcatactgctgccccccacaccaattctggccacaccttggctgggtctggccacactcttctcagcacgctgtacccagagcacagtttcatccactcaactcctgctccaccatccctgggacctggacctgatggacccaccgtgccttatccccagtggggcaccttgggacccttggaattgactaagctggattctgtaggtatgtgggagccctctgcatgcacatgcctgtgtctggggcctttgggctctaagcagtcattttctcactgctctgtcaccaaccctaggtacccatctgtcccaggagcagtgtcaggtagcctctgggcacatcccctgcatggtaaaaagtagttccaaggaagcctgtcagcaagctggctgctgctatgacaacaccagagaagtaccctgttactatggcaacacaggtacaacttctcatcccaagcatgctactctggatcctggcaggggaagtctcccctccacccagatgaactgccttgcatgcagtctaagagaacccagctcccaggtgcacacagacaccctcagtcaggaagagtacctgccccagggaatggttaggctcctccttagagaccctgacctacagatctcaaacatctgcattagataagtcagacctatctcattcatcagccctttgttccatcagctgcatagggagggcatttgcttaggtcaacatggggaagaagagctcaggtccctcgactccagcagtgattaaatcaattgtcacccacagagcccatcccctgcctctgcactggagagacactgagtcccagtgttctgatctgcctttgtcctagccactctccagtgttccggaagtggctacttcaccctggtcatgtcccaagaaacagccttgacacacagggtcatgttgaacaatatccacctggcctatgcccccaatggatgcccccctacccagaagacaagtgcttttgtggtcttccatgtccctctcaccctctgtggaacgacaatccaggtaggaggagaacttgagctagaggtgagtcccacctcttgaggggcctcacctgctagctacatctccatcctctcggggtaggttgcaggctggaagcaaggtcccacctctgggtgggggtggggggtgtctcacttactacctcctccgtaggtggttggtgagcagctcatctatgagaaccagctggtgtctaacattgatgtccaaaaggggccacagggttccatcactcgggacggtgtcttccggtaagtgttagctgggctacaggcctgggtgtgagaggtgcagaactcagcacagatttggaggcagctgagacaaatcctcactctgctattgcctagctgtgtgaccctgaatgagtttatgtatctcttggagcctcccctaccgtgtgcaaatgagaggctaagtcctttgtgtttatctgtctgtatatgaggcccaggcacagccaactgcagctctcccaatgagcattgtctttatcctctaagaactaagctttcagtaattgaaggcaacccttccaggccccaggaagctgtggttgttgcctccagattatgacaccacatacaaggtgactatacctcagactgaagcatctaaggatgtggtgaaggtgactatacctcaaactgaagcttctaaggaacttggagaggagtcctaaagggagaggcctcctgaacctgttttcttagggaccacaatcatcccagatgcctagggtaacaggaggggtgaccccaagggcgcctgtccttgttagacctggctttgagctttcaggacaaggcagctagctccagccagtgtgttctgccagagggccagtacgtcagccatgggctgtccagagcctgtgcttggcgccatgtgcttggagaatggggctcccaggcaccgagactctatctgccacagggttggggtttgagactgtcagagaacaaaagtcttttactttagcacaaagtacttatggcccagagctggggacatgagtcttgtagcatgctctaagcttttggacttaagtgctggggcagccagtttcagcatagcactggggactttgggggagtgggaacagaagtgcagaggaacagctggagtctgtcggttaggctagaggggtacaagacagcagagggtgaggcctttacagctggtgcagttacatctgtataacactccatccatgggcactggacatgggaccctgaggcatggattggtgactacacgacactcaggctactgagggagacactagacattcataggctacctgcaaagacaagcaaagcaaggccctgagacatagtcctgtggcctctcacagtcctcactagaaccctttagtggtacaaaggggataaatgaggctgttcctggctctgcaagccaagtcttcataccaggcttcaaagaccttcaagtgttgtcttgataccgtgttacctggcacccagagtgagacctggtatagccagctcaagctgtcctgtgtaggccaggtgggcagaagagaaggaaagggtgaacagtgatgcccatggttctagtgatggctcagggagcatctctgcaccctgcagaagatgctgtccattgcatccctggtggggatgtggttgattaaacaaggtgctctgatatgtggccttccccaacatcttgctcttggacttcaggcttcatgttcgctgtatcttcaacgctagtgacttcctgcctgtccaggcatctatcttctcacttcaaccacctgcccctgtgacccagtctggacccctgcggctggagctgaggattgccaagggtacagccccccctccctcatcccaccccaccactgctttttcctcccgcctctaatgccttgatgcacagtctgccctaggctcgaaagcccctctctccacagataacactttcagctcctattatcaggagcatgactatccccttgtgagactgctccaggaaccagtacatgtggagatccatctcctgcagagaaccgaccccagtgtggtcctggtgctacaccagtgctgggccacgcccactgccagccccttccagcagccccagtggcccattctgtcagatgggtgagtggctgcaagtgactaagttgtaccccaggggattcctgccagccatatctccctaagaaggcttctggacttctctctttgatctaggtgtcccttcaagggtgacaactacagaacacaaatggtggccttggacaggacagagctgctcttctggtctcactaccagcgcttcaccatcaccacctttgctctccatgactccagctcccagaacgccctagggggactggtagggagaccttgcgttcctcatgccccatcccacctgttgagtggtagtcagcaccctacaaactaatgcaaagatcccagcatgggggctggacaatagcaaagggatggaaacacattgtggaaggagacgactgactcccaaaactttctctgaccttcacctgtgtgctgtggcatgcacactcccctacacatgcaaatctgtacaaaagaaattgtgagagggaaacacccgagcgtggcttcttcaatcgaccctaaatctgaacaccagttgtggtgttctcgtgtggcctgacttctgattctagaaatgataatgtgttccttgttcctctgctttggtttatagcatagcaacttctctaaaagaaaaaaaaaatggatgcacttagggtgtttaaacctgtgtgagccaggcatcagtggcgcacgcctttaatctcagcactcaggaggcagaggcaggcagatctctgagttcaacgccagcctggtctacagagcgagtgccaggataggctccaaaactacgcagagaaaccctgtcttgaaaacaaaacaaaacagaaaaaaccttctgtgtggtgtatggatgacaccgtaggtaacactagtatagtccaatccgtgcttgatagcccaacatatcctattgatcacctactgttcacagatctctcgtatttaaatcactgcccttaactaatccggtgtggactggtaggcagagctgagggtgactcaggatggcatctttcccattttgcctgtgtgctgcctcccaagccaagaggcactgacctgctatatgaagggtgccatggctgaggtctgccggtgctgcctctggtcacctcccctgggctctgtttcctgaaagcagtggtgccttgtcttccttcccctctgtctccaggtatttcttcaggagtaaagagaaaacagcagacatatgttgcctggctctgtagctaaacatcatctcctgttaactgggtgggtgggaagaaaaacgccctgccttccaacagttctgctcctgagggcagaaggcagagaacaggccgaggaggactgtagttctcttgaatgcagcagttcctgcctgcagggagtgtcttctactgcaggtttgggctttcaggaagaggacgatctgaactctaaattggaaataacatagtttgcatccccaccagtatggaccagctgtggtcttagtctgcttgcccatgtctcttcctgcagtcctgcactggaatccctcaaccctgcctctgtgctaccagcccagctgcacaaaactagtccactccttgactgcttttctttctaccaggtctatttcttctgtagtgcctctgtctgctaccctgagggatcagaaacatgctctactatatgtgactctggcgtggcaagtgagtctgggcgggggcgttagttgttctttgatgcaaccttagacccgtggctgactctcagaccaccagctggaagccagacagctttcctccttggcagggcaccgtcggtcccctgatcaccacaatagcactgtccaggctttggacattgtgagttctccaggagcagtgggctttgaggatgctgctaaactccagccctcaggtaccaggggttgtgggtaccccaagggccatggccttctctaaaaatgctgatgaaacagggaagctcagaggtggtgtaactcactagataaggaactaagtaaagatagcccagctccttatctgccgacagacagctccaggtgtaccttccccaccccttctctgacaggctccagcaggaactctagttcaagacccctgctctgggtgctcctcctcctgctggccaccacccttgtcctgggggctggtgtctttgtgggtctgagttgggcctgggcccagaaactacaggaaggcagatgttaagtgggttcaataaaccattgtttgaaaaccactgaatgcagatgtggggaagttatttatgaaacccgatgtatgtcttatccaagggtgtgtgtgtttgaggggcaacagggtcttactctatggcctaggctggcttttaaaatcagcgattcttgtgcctcagagtgatgggactgcaggggtgagctacatgagacttgttcctggactcagatgtggtgtttcagaatcctgaccccgttaatacagtcgggtaccctgtaacgtttcagtcaacacctataagacagtgcctctgtaaaattgtgacacaagtgagaaactcctgtcactcctgattccacagccaccatgacatgagatatagtgtcacagatatgcaccagcttgtgccaagtgtacactagtgtagcctatacccaagtgtacccccacacacaatacagcactgttaacaagcttacatatttccttacactattatttttaaccacctttttttaccttttaactttttaaattactgcacatgagtaggtgcatatgtggaggacagaggacaactttgtggagtcagtgctcacctaccacctctacaagggctctggggattgaattcaggccatcaggcttgcacagcaagtgtctttagactagtcacctcactgacttttgccattttagaatgtactcctctttacaaaaattgactgtaaaactggacactgttacaccaattgtagtgtttcctactaccaaaagacttcagggaagctgggcatggtggcccatgcctttaatcccagcacttgggaggcacaagtgggcagatttctgagtttgaggccagcttgatctaacatgagtttcaggacagtcaaggctttcagctgtctcaaaaagctaaaaagactatatggagcaactgacaaaatctgttttattattgggagaggtgcacatatgtgggagccagatgacactctatggggtcggttctctttgacctttaactaggtggatgcaagggatgaaacttgtcaggcttgcagagtgtttttttactgcctgagcctcactagctcacataatgaggacctgtgatgctgtcctcaaagcaagccccaacagtgcttaacatacactgtagcttggctttactctcccaggtcagggtctgagaggatgcctctaaacaagggaaggtgttcttttgggaaggacaacacaagtagagggtaagggagggtcaaaacctggcagtttcagcaatggtaacagcttgtctagatgtgggtatcctcagagcaccggcaaggctgccttcatggcaaggggaagttcccagagtcccaggacaaaagcatcaagcctgaactaagtcccactgcaccaattaatcgagcactaaaggcggcagaacaccttttctagaagagggcaggagacccagacaccagccacacttcaaacttcccttcttgggctccaaaactagcacatactagcacatacagcaacagctggcagcattggatagcaacaagctggccttcaccctgcctgccacttgggaatggccatcagacaggatagaaccaggctatgttccagaatgtcatgttgatttgggctgggaagaaggtgggctcagcaagaggtacaagaagaatctggaaaaaactagtcatctctaggcctgtggcagggcatgatcttaactgtcacaaaggcaacaagccagtgctctcattcaacacaagtccattcttcacccacggctctgacctgctcaatcaatctttgagttatggtgaaacatgaaaccccgaagcctaagagcatctctgcttctccctggacctgttttcactttttaaattgagcctagtgtcgaattcacaggagtaacagttgaaaccagctgatgaagatacttagaatcatgtggcaccagccagcactttgtggatgttagcaactgactggaatgtctcatcctcacacctcactttacctagcttttgggggtttgtttttagttttgtttgggtctgaggtaaagtgcacaggccaagatccaggactgggaaaacgccacatttaggctttttctagaagagggcgggagacccagacaccagacacactttgaacttcccttcttggactgccccccagctgtggctagcgatgacttggcgcaggtacaggcaggtgtaggatatatgtgaagaccagcatggctgagttagaaagctgatcccaccaattaagagggacctaggattgacatccatgtttaaataaaacattaccactcaggtgctgccaactggagtcactttgtcactttcaagtttaaaaaatgaaataccttgcatcattctttcctttggttttcttttttctttttttccaaaacagggtttctctgtgtaacagtcctagctgttctggaactctgtagaccatgctggccttgaactcacagagatccacctgcttctgcctcccaagtgcccagcttgtttttctgttttaagactgtgtatgcctggagggtgaggcatgagcatgccatagcacgcacatggaggtcagagaaaagttgttgagtcagctctctcctacctttctatggattttggggatcaaacccaggttgtcaggcttgcacatcactacccactgagccctcctccctttcctcctctaaccttgtccatatactccccccttgctctttgaaattcatagccttgtgtgtgtgtgtattcttaaatatataaatacaacctgctcagtctatatgttatctataatgtgtatgtttggagagctcacaattgtcactttattatacctgtatcatccctaactacattctaagtatttatctttctaatcctttgtttttgagatagggtctgatacaacacagactgacctgataaccccgaacttctttctgatcctcatgctaggattacagtcatgtgccaccatgccagttttactcagttttactgggtgcaagcaaagaaagcactttctgagccagggtgaggtgtgtgtgtgtgtgtgtgctatacacccttaatcccagcattggcaggcggatctctttgagttcaaggacaggctggtctacgaagttagatgcaggacagctagggctgttagagatacaacccagactgacctgataaccctgaacttctttctgatcctcatgctaggattacagtcatgtgccaccatgccagttttactcagtactgggtgcaagcaagaaagcactttctgagcctgggtggtatgtgtgtgtgtctgggggagggttgggggtgggaaaggacactttctcagctgagtgagctatgttcccagccctagtgccccattttatatcattttaaacatctgtgttgtctagctttctgctgaactaggggcacatctgatctactgaaggaaaccaagcctagaacttcaggtaccaagtgctgaatgcagttatgtaagcatggacttctttgtgcactgctttctaggtagaactcctgggtcagacagaagccacatccctatgactgcgggctgagactgtgtggggacctgtcctccctgtccctccagatgacgctagatctttgcctatctgagcagcagaggcagccaccactgtcttaaagtgattttgctgcttttaaaattcatttgacttttatgtgcactgatgtgaaggtgtcagatcccctggaattggagttatagttgtgagcagttatgtgagtgctgggaattgaacccaggacctctggaagagtagccagtgctcttaaccactgaaccagctctccagcccctggttctgctattagaagctacacattttcatagccgcttgcatcttataacctgctgtgtctttcctctccattccttccttgtccagagagcattcacaaacccaagaagcaacctccttagttctcagcaactggccatgggcttttctttatgtgtttcatcctccttcctctgttcccttcctttggggctgttactttgacaatgcaatggctgcccttactttgaagttacatgagcatgtgattttttgatagggtactctgtaatgactattcaaatggtatataggttctgtcaatacctctgtatcaaagggttctgtggataaaacacatattacacatgaacaacaaactctgcaacactaagttttctatgctgtcaatgatggggaagcatttggtatctaggaaggtatatgcctagataccaaaagctctcctagcggcagtggagtaccccagtgggagagggagagaaaaaaggggagacagaaaacagctcccctctggcagtggtgcacaactttaatgggagtgacaaagggaaggaaaaaaaaggaagagctgggcggtggtggtgcacgcctttaagcccagaactcgggaggcagttcgagaccagcctgatctatataagagctagttccaggacagagaaacactgtctcggaaaacaaaacaaagcaaagcaaaacaaaacaacaacaacaaaaaaacaggaagaaaacagttacttgtttccacctgctggcctgagcaggcacctgagtctgtgacaggctgtgtcagacctgatgggcaaaccagccattcttcctgaccagaaagcagggctgcttgtagcccattagatttcctctcctgcctttgggccacagctaccagagactcaaggggttcccttcctcaccatactccccactagatactgagggcaaattatttccatgtgctttgacttaaaggaagtgagggctgaccagacagctcagtttggtctctgggacctatgtggtggaagaaaaccagcccctacaagctgtgttctgacttccacacgtatgtcacggtataaggacacaagccacacatacatgagataatatatatatatatatatatatatatatatatatataatatatgaatatttcagatttgagtactacagctcaaggagcactctatccaggcattcctgcaggaacatggactgcaaatgggccttttctcttccaataatgagacataccagaccagtctgtagatgtaaacaacaaagtgccaaattatgaatgtttatatgcacttaagtcactgttgaactaatgtgaggggggaaaagagcaagtcacaaagatgggattaaataaaaacaaaaactctgggaagtaaaaacagcttctattttgggaatttctacagaattctgatgatgctgacattctgcctagatgagtgcagagatcaaaaatgcagctgagagcctgccaaaggcagggaagtctgtgtctaggcgccgagaggctccatccagagtaaggcggggcagaccagtgcacggagctgggcaaagaggaagcttgcccatcttggtgctgatggacttttttaaaaaaaatcctctgccccagtaacgagaagtacaagtctctttttctaatgtgtgctgtctaaattcttagtatgggggtagaagggcagaggaatcctgcaagttttagtcttggatgtactctgctttgtcttgcctccctccttggtttgacgagcatttggttttttgtttgttcaagacggggtttctctgtataaccctggctgtcctagaactcagagatctttgctgagattaaagatgtgcaccaccacgcccagctggattgatgagctttaatatcaggcttaaggatggagaaattaggccaagccttaccactataggtgtcactggcagccgtcacaaagcagggaagcagtctgtagttactgagggccaccttgtgttcacaccttgaaatagctcacttagttctcagccctacagggtggataccacagactcatagacaaactgacacagacttactgtaaaaagataagagctgggggtcaaacctagccttgatgccagtggctactaaccatgactcccagagacctgtggaggtcactagctgcccattgctgcctcagctttgtctctgaaactaggcttcaaatgccaactcacgggatgcttaggtcaagatgcttctctgaacaccatcacctgcagaacagtactagcaccacctgctggccggggcatgcgatgcaggggctctgccaaggtgccaggttgagctgggagccagagattaattacactgcacccaagtggcctctttggttgatgctccaagttcaagcacaatatagaccccctgtcagtttcacagtaaaaggacatggctttgaatgtttacagactcaaatgcttctagagtacactaagcaccaatccatttcatagcaaacacattctctttgttcaccaggcctagtaaggctcctagaccctatactaggactggtgtggctggtgactacaggaaggtggagccatttagaagccatcaagccccaactgagagttgcttgctttatctcccatcagagcagctgcaactatgagcaagagacccccgagactgggcctattgactgtcaatattctctcatacaagtaggtggagagagtcgctgaaccctcacttgttcctgcaactcctggccatctgtatgtactatataaactggtatgctataaagaggggtggctatttgtttacatttctggtatttgctaggactcccctatctgcgcacataccacatacttcacaccatttctggcttttttttttttttttttggtgaattatcaagtttattgagatgtgtaggaatctgagcaaggagcacagatgatacaaaggcagcttcaccactgaaaagtccagcccagcatgggccatgactcaccaaagatgctccctgtggtcctgtatcatttgcagaacaattgctgcttaccttgggggggcctcagtgatcatttgacttccaagtgcatcctgaccttgtaagctgtcttccctcctgggccttgtgtttcccttactgcccaagtctcagaaacctattttctctttttagaaaggacatttctggcttttttacattaggcactagggatcgaatttagggtctcatgcttgcttagaaagcacttaccaactgaactatgtccccagccactgtaagtttactggatacactttcagggagcagcaggctgcacagtaactacaacagatggtttctctatcctggcagatcgggtaactctgaatttcctggatcccaggacttgctggcagcacatatccagaggctttgtgctgtgcttacagtacagactatcttgacttgtccacagcctctaggtgacgcctcacttctcagctcttccttcccaacagtctctcatctgtacacacaagctccctttcctcaccccaaccctgcacacacacctcacctcacagcaggctcccaacaccagcatcctggggatggtcccaaggccctcctgggcacacctaatggtaacttgcccttccactccacatctcctttatcttaacctcagaacctacaacttttctcctcctctttagccccctgtccccaggtgacttccaaatgtagcacagtcacaggaccctacattaatcccccctccccaccagggtttccatctaactttttatttactgtgcattaactgtctcccctgggagcagctctacttcagcggattagctgccagtcaagaaaatctctttggccagctgggaacaagtttgtatcacccacaactgaagttcccctgacaatccattcacagcaaccaccaacaggctaaggctaatctaattcctcaccacatttcattcaggcttgtgagagagtaagcacaacatgattgatggaggcactggaaacaaggtcctgcccgagcaggggagacttttttgacaaatggcttctaggctttatttttgctgcaggggaggcttcctgatagccagtgtctcacattttggtctctccccttgttcttcccaactcagggtctctctggcagacggacgcaaggagatgacaatatttactgagtggattttttttttttaatgaaactagatcactgcttacaaaaaccagcacaagctctcctgcccctccccttcacagttcccttggctcacctccctgtctcagaagagctgaaacagagcaggcatggaacagctgccactgctgggggaggtgccggactacaactctgagcatttatagggtgacagttcctccatgtccgttccctggggcctgaaggctgcatggatagcagtgttccatgtaccctagctcagaccatcatccagaccagaatgaaatgacgtgaatgcccctgccccaccagacctccctcttcctaaggtcccacccgccccccaactctaacccactactgagatgaggcccagaattgtgagaaggcatagggcctacagactgtagaatttgaggctcctgtccatgccagttgaagcgatgaacttggcgtggtgaccaaaggccactccagtggtcaggccactatgctctgaggagagaaaaaagggaactataagaaagaaggctgtttcttcttcggggctgaagaatgacattgaatgccatgaccctggcacaaacccagatggtaagggtcagaaggcactgtaagacaccctcccaaagacagggttctgttcaccacttattttaaccaggactcagcacctggcaagaagcggaggtactcaatcttttgttggcgggataaattaacagaggaataccaattccctttcacctgagctttctgggcaagcatacttcagctggaaaactcagtgttcattcagtatgtatgtttacctttagctctttgcttggacctggaatggtccattagccagttctagctcaaacatgtcaaagtccagggcacacaatacaggactggatccagaatagaaaaagctgagctatcttcctcacaggactcagatggagaaccagggcaggttctttccagagttaagaaaacacccggatctcaccaactctccagagaaaagccctcttgtgctcccagctggcctaaactcaaggtgattctctagtttagctatcaaaaattgagattacaggtgtgagctatcacacccagcaagatcccctaaagttgaggctatagcagctactcaaggccataggtgactctaaggtgagaaaccctcttgtgcaccactgtcagcctgacttccctttattacttctagttatccttgtgttgtagttatacttgtgttggggcttgaatacttgctactgtgggaaaggccccagactccatctccacacaaaggaaaactgcctaacttgactttaaacttcatcactcacacatgatagaccccaataaagttgacaaaagataaaaaaaacatgggctggagagatggctcagaggttaagagcactgactgctcttccagaggtcctgagttcaattcccagcaaccacatggtggctcacaaccatccattatgagatctggtgccctcttctggtgtgtagatatacatggaagcagaatgttgtatgcataataaataaataaaatcttaaaaaaaaaaaaagataaaaaacatgccaggtgtggtggtgcacatctactgtcccagcacttggtagacaaagacaggaagacctctgtgagtacaaggttagcctggtctacaaagtaagttccaggacagccagggtttgttatacagagaaatcctgtctcaaaaaaccaaaacaaacaaacaaaaaaaccttcattacttcccagactggttctttttcattgctcaaatcaagagccaataccaaataatataccacaagacactgctaacctatgagttgcatgcactttcatgtaaacccctatatttcctactgagtgtttgaaattatcatttcaattttcctaaggcaccagagagattacaaattacagaatttgctcctcaacacacaacttgggagaggccaggtagtaacacaactcacagccaaacagactcacaaatgcttttcctaggctacaatgctctactgcccccagacataagtaaaagcagcctgggggttgggctcagtagtaggaaacttggtcaggttccactcccaggacagcaaaagtaggaatagtttgggcctatctaggccaagcccagagcttcaccaccaagtgaagcttcctagagcagatgtacaaggccccggaaagccacagccagcctctacctgtaaagtgaagaatctctgtccactgtttgcagatatagatctggacatctgtacccccaagagccaggtaggtaccactctggtcaaagatcagtgacttcacctgccaaaccccaaagaaaggcaattacacaaatgtcaagccacagaacaactgggacaaagagaagcagttcacatgaactcagaaaccatcagggagtgaggacaaacaactaagactggggaggagcgcacctcaaagttgttatccagctgcaatgtcttaaagttcttcagcttgcgtaagtcccagagcttgactgaagagtcatcggctgctgtggccaggtagtacccattctcagagaaggcgatactggtaatggggccagaatggccagggaaattggccacattggtacgctcctacaggtggtggttggacaaaaaattatcacttacgggttaagataggaaggggcttaccaaacttcatgtcctgtgcacccacagttccttggtgacattaccatgccacacaaacaaagccaggctttcctaagccttgagaaatcctggggcctgctgacacacctcatcagttccttctctaagaggcctgcatgtcctaccttcaagtcccagatcttgatctgggagtccatggttcctgttccaaagatgagcccatcaggatggaactgtgcacaggtaagagctgaggaaaggggacagggatctgtagtcagtagtcaccgtggcctctacactggtgcagtggtaaacactgtctttagaacaaataagcaaatgactaagtaaaacttaaagacaaactgcaaacaaaagagttcagtgcctctaaggacacttacagcagccggaagtctcatctgtcaccttggtgagcacgcgccctgtctggatgtcagagaaggcccagtactggaggtgagacaaagaagccaatgagtaagcaggtctggtagctgagaccctgattcagcacctactggcaaagatagctcccacaacagggaaaaaacctttccagaactctgggaatctggctgccccagcaagatggcccttcctcccagggtgagtaggcagcctcctcagggccctagctgggactgtacctgatcatcagaggaactcaggagatagtctccagtagcatggaggctgaggcctgtcactgcactctcatgggctcgaacaacctgtacacaggaggtgtttgggaccgaccaaatcctgatagtcgcatctggggatgcagaaaacaccagttcctgaaaggaaagcaaccaagaatcagatcctaggaagtgaaatgtactataacacccttttccacagtgaaaaggacagccataactaccagcaactgcttctccttctagtccctctctgcctgtaaccacctatctaaacaacagtgcctaagaaagccaagaaaaataaatgctgctgaaatggccacactgagccaagttgagaccctcactacttagtagtaaacagggcaactgcagctgagagctatttttgcccccttttaaagctgggtggaactgagggactggaatcatgtgcacctgcagctaaagactactggactagatggcacagatccgagcagactgagcctgtaaaggaatataaggtcatgttcccatgttcctcacacttagacccaagggcatgttgattgtccaaaagacctggggcagacagagagcttatttagtttcccaaataaattatttccactagttaggacagtaacagccagaatataacagcaactatcctttcattaacacatactcataaaagccaaaagtaatactaacaacgaataaacaggaaaaaaagtacttcaatttgaattagtttttcagtttgctatagctgtgatggtttgaatgagaatggctcatatatgtggctgcttaatcaccagggaacggcactatttgaaaggattaatagtgtggctttgttggagaagtatctcattgggaataggttggttttgagatttcaaaagcccatgtcaaacagtgtgtgtgtgtgtgtgtgtgtgtgtgtgtgtgtgtgtgtgtgtctgtctgtctgtctgtctgtctgtctgtctcagctactggcccagtgtcaggcttgccaccatgctccctgccatgatgataatggactaacctctgaaactgtaagaagcaatcccccaattaaatgctttcttttattaagagttgctgtgatcatggtgtctcttcatagcaaaagagcactaagacacaaatagtcctctatttctcagttccttaagtctaagagaaagacttaactgggaggcactgtttcagcaccccatgcagctgcataccaagccacagtactcaactcttatgagaccattaatctcctctaatagctacctttatcctcttttctatttgaactcacaccactttcaacagccaacatttaattttgaacccaaccacacagggtgtcatgggaacagacacctagcagtcaggactatatagagctttactgtctgtagtttatctataaacgctctaggatgtttgttttcttttcctaatgcaaaattgatgtgaatgtgctttgttggttgcattttccttctcctttggtttgagggccacagctttggggttctacacagagacccatcaatgcccagttcagttcatcaaaaaggtagagattgggtgattggttctgaaactcaaaactactggaacaggacttaggaaaggacaagggtggctgtgaaagtaccttacctgagaaggatgaaacaccacgctggtgaccttcttggtatggcctttaagagtggccaggatttgctcagtactcttatcaaagacaacaacgtttttatctgccccacctataaaatatccaaaaaaagacaaaaaaatgaatcaggcctataaggatcccagtgctaaagaaggtctttctgtcctcaaatccatgcagagaaccaggggcttgcaccttcccttgctcctgccatctcccaccttgacctatcaggccaggctcagactcaccagtgagaatcttgttggtgtccgaaggacagaggtccagagcaaggatcccaggaatgctagcactgtgtagcccctatgcagacagaaccacacaaaatccagtcacagccaaatcaaggcagaccagagagccacacagctcctccactccctataccctttggtattcctcctcaggcaaggaacaagagtgaattttatcccttatccatccagcttggctggctgcctggatgcagcaactccctcactgcatggcaagaaaccatgtcagaggcctgagcagcatttgcccctgctcctcatgctggcccatcttgccctagaaatagagtcacctccagctacttaccacatgggatgccacctgccggtacttgctgagctcttcgggtttcaccagctcctcaggcacagtctttcctctctgagaaaacagaaaagaccccaaagagcagcaattgaatataggtttcaactagcccctcctccaaaaagccaaatgctcacaccaggggtcaactcaccttcttacgctccgtggttagaacagtggccttgtcttgaagctgtggagaacaattttctgagaaatgattttgcaaggacaaagcacgctgggtgctggtacatctggtatcataagcatcaccaaaaacatgctatttgccaggttatgtgctaaagctgacacatttccactctggtcttataaggtgaggtatccatgaccttatggtacaactgaaaaaactgaacatcaaaagactcacctccccccacccaaggttactaaagtgacaaatggtagaactagtagggacagagctaggctgttgtgttctgggaccaggtctaaggtacaaaaattagaactcagacactgttggaccccacaaatgcagactgtacattcaacagaaccctgcgatgcagtctggaagcctgccttgccccttctcagctatgacttacagtcacagactcctcatcttaagataacttctatcttgtaagcaaaacctgtcacaaagtggtttaatatcagcaaagaccacaaaaacagcaagagctataagctgcccttatcagtaattaagtcttccctacaacaagcctgtgaagtgcatacctcactctatttagaaacaagggagccgggcggtggtgacgcctttaatcccagcacttgggaggcagaggcaggcgatttctgtgagtttgagaccagcctggtctacaagagctagttccaggacagtctacaaagccacagagaaaccctatctcaaaaaaacaaaaacaaacaacaacaaaaaaaagaagcaaggaaaatgagacagagaaaggcaggctaaagtcagcctagtcagaaaactcaagagtggcagggcaggctttccactgctcagggtgagattcttactctagccccaagacccatggcactgagttaggaggacatgtggcattcccagcaaaagagcatatgactcaccttctggataatctcaggggtcattcccaccagctcacccaaatccatgggctctcctgcaccctggagaaaagaaagggagaatgggaggaactcacaataccaaaggcacctgtgtaaggacagctattggggcttggaatggaacacttaccacaacactgggctgtgagcttggcacggcctgaggtacaataagaccagcctgtggtttcagagtagccagagctgagagaaaagatgatgttagaaatgggacattacaaagcagagccagcaaagggtagggaacagcagggaagaggagacaccttctcgagcagcagtgacttccttcgtgagacgggcaatgactcggcaggcagcatcgtgttggtacagagcatgggacagctcctggcgggttgtctgcagttgctggcgaagggtgaagctgtgcagcatgactgcatcctgggagggggtaggccactgtgaggactgggggagagctggagaactcggccagccctggagaagaggacaccacctcctattctacactgaagccaacctgaactactcagagacccaagctaacatatgagtgaccctgaatgccctgtaaggcattcaggctcctactccacaccacaccctggacacatagacagaagcaagatctggctccttccaacccccagctttgctttacttcagcagtaaagcacatatgttaatgccatcacttctctgaaaggaaataatgctgctgtggttatttactagctaccctcagcaagtgcagtgctcagtaatgaaagagagtccctgacgtcacaaggcaaatttgtcaattttattctacttcttacagagtacagacagacaggactaatcaatgtcctatagtcaggaaggtcaagcctcagagactgagcagtgtgccccaagtcacaaaggctgacagtggagaaaactttggaatccaggtctgcaagacttccaacaagcaggctcctcttgtgctgccatcctgctcctcacaaatgaaatatggctggcaagaaatgagggggctgctcagtggtacagcatttacattagccctgtgttcatccccccaaagagtcaggcctggtgggcacttgtaatcctaggcactaggaggctgaggaggaagcatcatgagtttccagacctgtctagaccacaaagcaaggccctatctcaagaaaataagagagcctggagagacagacagtccaggagttaagagcacttgctgttcttccagaggacccgggttcaattcccagaacccacatgggggctcacaacggtctgtaaccacaattccaagggatcacacaccctccccctgcctcccaagcaccaggcacataagtgacacacagacatacatgtaagcaaaagacccatacacataaaataaaaaattaaaaagaaaaggagggcagtcccacctttttaatccccaggcccagaggtgcatactcttcaaagaactcacccactcatcctgcaaggctttcagaatggctgggatgctggtggcagagggaggcttgggccgaattgggtgagcaactgccaagagaggcagcaaagcaggtatgaagaaccagaaccccgggggctcacccctcccccacccctcctttctttattcattcacagccaccatcttctccaccagactggctcctcctcccactcttgaaggctgagttgagctggccctggacttaggctatcggtcgggcgggcacctttgatgtcgatgagctgctcctctgagagaggctggttgttgataggatctgtgccattctctgcaatgtacttctcaatgagccgccgctcgtacacatgattagagacaggggacacacatgggtgctctggcacttcgttggagactatagagaaaggcaggtagtgaacacagggtaaaaggaggcctgggctagattgtatcggcccccacaagaccctgtcctcatactcagctatcagaaagcaaggtctgtgacagcaagccagctggtacttggccctagaatacttgccaactacttaactaggttctctagtctgctgataataaaagccagtaaataataactatatgtcagtcccataaagagtggtcagtatgccctgccatctcatttttgaacaaatatgactgactaggcatatgacaaataagtacacacaactcaaacccctgccattcgtctggagccctagatggaacaggcagaaaaatttctaagcaatgtgacaagcactgataaattaaaaaataaataaataaaaaacctttctatagtgtctgctactgtgtgccaagcaagattctattctaggcacttgacagaatagtctgtgtacccttgaagatgggcaccacagctgtcactgacctccaggacaatgcagatactaagcagacacttgataaacatcagaacatggtacatcctggggctcaataaaaaatatcccaaagtatggagcctggtaatgctgaactaccaaaaaggaagaactcaaaagcaagctcagaatcaaggtctctctgaccttctcaggccctcttgtttctctaacgtcccctaaacagggacaattggttcacctcagcagacgagtgaaagcaacctccacactcaagactcttctgagagagattatttattgcccgagagacttatcacgtaacagaacagctcttattcaccacataattctgtttgccttcccacctgaggcctcaagctcctattctcttctgtggcacatgggtctgtacaagcttcccttagaatcacctatttttgcaggattcccatgcataagtaatgaagtatgggaggaaacatggctttcctgtgctattctgttggcttatctcactcacatactcaaccactgaacacttgagtgagctttccctcccctacaaaaaggaaggatggcccagggcatgtaagcgtgctctctcaagattaaaaggaaacaaatcgttcgaaaatactttgcaaactgaaatttcttatgtgtgatgtgaattcccttttctgtttgtcatttccctccttcctttccctctttgaattaatggcaacgttctgagaagagaatggagagggaggggaagctagtgatgtggtaaacaagaaggtaaacacccgcaatgccgttaacaaaacacccaatgacaagacagcatacagtatggaaaaagcatggatccgggctcaaagaaccgagctccaccgcccagctgtgccgcacacccctggataaacctcatgcttcctaagatttctgacgccctctctaaatcacggatctttatttccattcagacaatttttttttgtaagcataaaatgggatcatcgtttggaagtgcgtcgtacatcaatacaggtctcctaaatggtcgctgttttcattagtcatactgcgcgaggctagaagccagacacctggcttccagccttgcctccaagtcactgcgtgatccctgcaaatcgcagacacatcgatgcctaagcgacgttcccgagcaatacccactgcaacgctttcaatggatgctgctgcagatggggaaactgaggccctggaccgctgctgaccaggtcacaatcggaggcggatgctggacacgtcctcggttttcccacaccaggagctgtttttccctgcaccaactcccccttcccacccccccaccccgttcaggcccgtctccgctcagtgtaacaaccacagtcattcttcccagctacgtgaattgcgcggcactgcgcaaatgcaccccgcacgcagggccgcgggctccggggccccggccgcagccacgctcccgcctcccgccgcagccagcactcactcgagcagatcagggacatggcgccgtcgcagcgctgccagtcgcctcacagcgggctcccggactagctctgcagcctccgcgggccacttccggtcccccgccgcttccggggcgctcggacgcgggttagacagctgcccggcttggcgatgctcggacaactgcttcacgtggggaggtggccggtggcgcgcctcagccttcagcagctaacggaaactgccctttcccagcatgcaatcgagcaggaaaaggcccgcctcggaacactcggctgtttccgcattggctcggctccttccggcgagctcacccagaggccggaggcgggaaggtcagtcgaaactacatttcccatgaggctgtgggaaccataaacccaggaatttggccaaggctgcttttgacgtggtgctgctgtcacccagggcacagcagtatatgagacggtcgtgtgcaggacaattacctcaggagcttataaaaatacatatttctagggtctgccttagagaatctgtgggcgtgattctgaagcctgtgttccttggcctctttttgagaaacaatgccaggtgaccctgtgaataaagcacaaatgagtaaagaaattaacgctgcccaggttctgtctctactcttattctgtgaatttagacaagtcactggcttcgtcgtctaccacgtcttaaacacagtctcttttctagactggaaggaatttaattcccaacgtcttgtgtagatattaaaagaatggaaattttctgggcatgctcatgtatgccttttatcacagcactcagctgcagaggtaagtggatctctgtgagttcaaggccagcctggtctacatagtaagttccaggacagtctgggctatgtagaaagacatagaaacatgtctctaaataagtaataagaatggaaagttagagctggtcattggtggtgtacacctttaatcccagcactcgggaagcagaggcaggaggatctctgtgagttcgaggccagcctggtctccagagcgagtgccaggataggctccaaagctacacggagaaaccctgtctcgaaaaagaaaaaaaaattgtttgtgtgtgtgtgtgtgtgtgtgtgtgtgtgtgtgtgtgtgtgtgtgtgtcacagcacatgtgtggagatcaaaggagaaatggtttactccttctatcatgttgatcctgggattgaagtcaggttgtcagacttggcaataagttcctctccccagtgagctatctcaccagcccaaagggtggtgacatttttgatgagacctaaatgaaggacaggtgtcagtcctgagaccacaggtttctaatgagccaacctcttctacagccttacctcatcttctcagccatattcgcccttcaatgcccccagaatactggcatgtggaggctcaaaatgtttatgtggacagctttcatcaattcctttcgcctccctggccaaaccctccagtgcaaacctcagcctcatcttaagtatagcctcttctgcagcccctttcttgacctctcactggtttttggaattctccaaaacacttttagtaactattgttttaattatttatttagaaagtccttttagcacctgggtcctctactagattgtactactctctctactagttctcaagagtctaagagtgtcgctcagtgcctgacacttagcagagacattgccagtattgtttactgaatggcaggctgcctgacaggccaggcatctcaagtatttagatatagagaggaaataaatcagtctaagtggggctcctgaacccaaggtgattagactagattggtctggcaacaaagtagcatttcactgcattttgagctatgaagtgataaccatactttcagaagtttcctctggaagatacatacaaaatagtttggaacaggatagttttgtgtagtatctgtttcctgtgaattgaaacatttcctcaagagggagaaaggagtcccctaagactcaagtgacagttaccaggctcaataacttctgaatgttgttaagattcacaaagcagagagatggctcagcggttaagagcactgttcttccagagatcctgagttcaattcccagcaaccacatggtggctcacaaccaccttgaatgagatttggtaccctctgctggtgtgcaggctaaagactgtatactaaataaataaaatcttaaaaaaaaaaaaagattctcaaagccctccctagtgttataaagcagcaagtgatttggggagaggaaaaacttttagtggaactgcttgcaagttggccagggagccccagaaaagcagttcttgtgaatcctccttcatgctggggtgggctttttaggcatgcagttgactttgagtcacccgtaggcctttaagtgacacctataaacttaactgcttcaccaagctaggcttgggtggagttgcttctttgccatctccccaggaaaagccacatacacacaaatggaataaaaaaagagagacctggtatgatggaaacatgctctctctcaatacagcagtgttgagagagagggcctttgggaagtgactgggtgtcgagggctctgacctcatatactatgggattaacaggttagtggattatgaaagcagtggctttgttataaaaacttgttttatagagctggggtcagagctcagtagcagagtgcctgcttagttagtgcaagatcctgggttagatctctagcaccacaaagataaaatagggccagccagatggttcagcaggaaaatacgtctgctgttcaagccgggatgacccaagtccaattcccacataaaagggaggggggaactaactcacacacctgtctggaatacttgcttggagttaccacgtgattctgtctgttatgttatatgttgtggcactcttcaggtattggagccttgttcttggtgtaaggattcaggcacgttgctggcctgtcacctggcagaatacactcagggagtaccgtggtcagccagtgttccatggctgctacatcactacttggtctgtacacaggtgcaaaggaccctttaaaaacaaactccacccacttttattctctttcccaatgttcctctgaagaggcatttcctgcttcccttctctctctctctctctctctctctctctctctctctctctctctgtgtgtgtgtgtgtgtctctttctttctctctctccatctttctcctcatttttctcttctctcccccctcccttccctctgtaataaaacttcccactcaagctctttctccttggcatgtgtgtccttcaccaccatggaattcagcaaaggtcccccactcgccttattcctaacacttggtcttcctagccttcaaaaacaagagctaaacaaacctctactgttttataaatagcctctggtattctgttacagaaacaaaatatagggtatgacctctggtgattaattattattcccctgtgccttgtagatattgtattacaaattggcaatatcacatgagcagcatgtgtgtctatactagggaacttatagttgtgatataaatggtatcgtgaagtcagggaaaacgaaggctcttgaagccttttttagtttcaaaggccagctcctctaacaatggaaaggattcagggtataaaggaaagaaaacgtcttaatacttgagtctatgaaataaaattattgcagataaatagtaaaacattttttaaaaaaatatatataattatgccagagtccaacaaaaaatatagcagagaagggagggccagggaaatgagagtttgacaccatccaccaccctgggctgcagtggggagtgggagctcagggcctctgggtgtggagtggtaacaagtaatgagaaagaaaggagaaataaacttgggataaaccacggctgggagggggcgagctggggatgtatctcagaggcagagagcagagcacttgcctcacttatcaaggccatgggctccattcctgcacacacacagtctgtcagataataaaagttgtctctgaggatgcttcagaagtgaaattgtggactgaggacttagcttagttagttaaaggacttacctagtgtgcatgaagctccaggttccaccttagcactgaagcaggcatggcagtaaacacccataatctcagtgctctggagggagaagcaggatgagtcattctcagctaagcagttgagttgagggtagcctgaactatatgaaactctatctcaaaactaaaagaaacaacaagaaaggaagggaggaaggaaggaaggaaggaaggaaggaaggaaggaaggaaggaaggaaggaaggaaggcagtgatggcatacacctttaatcccagcacttgttaggcagaggcaggtggatctctgagttcaaggccagcctggtctacagagtgagttccaagacagtcagggatacacagtgaaacctggtcttgaaaaacaaataaaaacaagaaagggggagagttaaattgacatgccttctttcctgtgagggaaccttcccaggctgattggaattccaggcaagggactcatgacaaaaggatttctttatgggggtgactatctttagtccaataggcacttagacattgctttctcagtctgctcctggtagtctcagttcagtatgccattctggtacattagttgctggtgttggtcaacttcatgtaagttaggatcatctgggaagagtgaacctcaattgagaaaatgccttcacaagattgtcccacaggcaaatctatgggacattttattcatttatgatagaagtaggagggcctagccctctgtgggcagtgccatgggcaggtagtcctgggctatgtaagagaacagtctgagcaagccagtaagcagcattcatctatggcctctcctgcttagttcctgcctccaagttcttgctttgagtttctgccctgacgtccctcagtgactgtgatcagggcatgtaagccaaataaagccttccccaagttgcttttggtcatggtgtttatcatagcaatagaaagcaaactagaacgtatgccaaagcaccatactttggtgagtcattttcctgaattccagcaaggaagccaggagtgataaggtgttatgagtccctgaaaagggaattttatgccttgttctaaagcaacagcttctgctgctcctcaggaaatatggaggcagatcggcaaaaatccccaaagcttctctgtttcttggaagagtcagtagccatggatgaggacgaagagcagaggattagctaaggtagcagagtttctgaaactaccagctgaaacagcagacagccaggattggatgaacttgttccctttccgtgggttggtggtggcagggactacagctccacactgtcactcacaaaagcttggagagttcctttaatcttttagggaacctgacaggtaaaacttgatcctgtcgttctttctttccttctttctttctttcttcttcttttaaataagtggggtttcagcatttttgttttgtttttttgcttttggtttttttttggggggggcagacagggtttctctgtgtggacctggctgtcctgtaactccttctgtagaccaggctggccttgaactcccagagatctacctgcctctgcctccagagtgctgtgattaaaggcttgtgacaccactgatcggctttgatccttttttttttttttcaatccagaaaagaatttaagtctagctagtatgaagcagagttgaggtttattaaataaatatatatatggaactagatttaagaaagacacccagggaaagaataagacataaccaagtgtgtatacaggattctcaagagtcacaattacaaaatattctggtgacactcaagttacattaaaagaatgctaagaatttttttttttatatcctttactctctttctggtaagtaagtttatagggtggctccagaagtgactgagttagtcgtataatctagtagggttacataggtgggggaggattatgacaggtccttcttattgtaaatgggagtttctagtgaagttcctagaaacttgtacgcttacagttaggaggcgagaaatgccttgagtaatttttaattgtgttggaatcttgattcttagctggtaaggaggctttaaccaaacttcagagtgagggcctcctttcccatcccatgttcccaaacatttccatttttccatcctacctcaatgtttggccctatgttaatttcccaaggtacttgcaacctggtaagaacctagaaacaccaccaccaccccaccatgcctgaaatcttttctatagaggcaaactgaaattggaagaaatttcacaagcaaatagcaagctgcaactattagaagactccaggatgaggattctaccagtacggattctggaaggaagactccggactgagaggcacaggaagcaaccaaagatgtagatgaaaatgatgagtctgagaagcatctgatggagaagcaactgcgtgaggtgacagatacggggtgaagaaagaatctgaaggctgattcaaggatagggtgggggcagagtttgtttctgaagaaggaattttaacattaaaggggggggggctgtcttatggcatcctttgatggggctcaaaaacaacagcgacaacactgggcagctgagatggcgcaacaatacaggtgcttgttgccaagcctgacaacctgaatccgatgggatccacatagtaggagagaactgactcctttcatctccatagcagtcctgtggtgcgcgcacccacccacacaaaacaaataaatacatgtaagttaaacatttaaatctctgtgcctatcccattcacaaagttaccttagtggttctaaaaagggcggcggcggagggtgggggattggggtttcttcctttctctacaagtctaagcaaaggttggaggggtcggggcgggggaattgcacaactggagtgaggttttgctctctcccgtggtggatgcatttgcccaagacagtgcaccgctaaagtgtccactgagaccttttgtgccttttcatcacaaaaggtttctcaaccctccaggtgctctccagaaccccgcttaagaactacacttcccgcgatgccgcaggagccgcatccatggctcggggaaattgtgctgccctaaatgcgtggcaaactcggatcagcaccgaatcccgaaccaaacaccgactctaccaacgccacagcttcgacagttttttttttttttttttttttccctttcctgacaaaggcttcgcttccgttccagctccaatttccgacgccattcttctcttggaaatgcttgggagggaagcacacacacacacacaagccataatggggcgagcaaagcgcatgcgtccacggtgtcctctcggacagcaaagaggcccgccagtctcccagcgcaatcgccccgcgcatgcgcagagtctaaaccaacaccccgggagttgaggcgcgggtttgctggcgcgtttttcagcgaagtcgcacgtgaaggatagcggtggctggagcagggtgagtgcggcccgagatctgtggtttggatgctacttatgggacagatttgcaaagcggcaacagggcggagccgcgaggcctgtgagccggattggggaggggtcgaacgtggagcgtggggctcagccagcctggaacccgaaacctcgttgctatgcaaccgggggcgttgttactaggtaacccagaagtaaagtgtttcccggagaaagtgggttcgagcgctgaggtccagtagagggagcagctgccagatttgggggtgaagtcagtgctgagctgtaccctagccccatggtccagcctcttaccatcccagttggagcccccgtctgggtacccagatctcatgggccttgcgacgccactatgaagcgcttggcagggcatgtgttgttcgaaatagcacatgccactgacaacctgtcgtcgggagtctgggccttgggaagggagcggcaaggctgcccctctttgcagtcaccctacccccaaaacagttgctggcggcagctgtcaggggtttagctccgacctgccagaacgctgacttcattctccttagtggtgacttctccgcgtttaggatcttccaactcagctatgcttctcatgtggctgttgtatatttggattcactattcaaatacgcccccccccctccaagtctatggcttacccttgtggcttcttggcgggcttcagatattcttttagcaagcattaattagtcattctatgttaggtgctgaggtttccgagaaaagttaatgtcaagttagactgagttgttgcgaggttatggcacaaattgtgaacagggtgcttgcacaaaggattcaacttctcaaagcaactcttaacccggtttcaacagggtttacatttgaagagattgaaagtcagataggttagttaagtaacaggtgtaaaggtagtggcagctagtttgtgatagaattgaacctatgtcctttgtacagagagctctaaggaggctttgcttaaagtacactttttctctgggcttctaacctttttgattctgcctcaggaatcctggggcgctttaaaaacaaaacaaaacaaacaaacaaaaaggctgagctcctccctgggagagtctgagtgggttgcctgggtggggcagacatccttgtttaacaggctatgcaggcagtctagatgggcagtccggtgttgaggaccgctgatccacaggactgctgtaagtagtgaaaggacaggtggggccagcagagggcaccacgttagttcctgctctggtagtgatttatattgagaaaggaaaaagaagaggaaggagtgctgtctgggaccagtgtggacagccccaccctaccctggctgagcaaaccacagctgaacatatatcgacttctcatcaccagagtaagtaaaagcagttcccccagctgagactgctcctgcctgagctgaattgcagctgtctgaataggagtggccagtctcagtgctacgtttggctggttcctcttacctccttggtgtataacctgtaaactgagcaggtgggccatctcctgctataagggctcctcttgggagatttgggtgttttctgctttgagcctgatggtggttggtgggactgtatgttcccgagggcagagagcaggcattaccaaggcagtactgaagtatgagacagacaaaagggcaagcctgagcttcaagtccccacttctgctctaagcaaagtgaggcataaatgataacaataaagataattaaggctggtaagacgctccatggggaaaaagcacctgcccgatgggcttgatccctgagacccacatggcagaaggagagaactaacttgctcacttggtctttggtgtccacacatgcacacttgtacatacacactgttgttttgtaactcagtggtggagtgcttgcttgcctgtgcgatagctctgagtttgatttccaggtacacacactacacacacacacacacacacacacacacacacacactgccataagaattaaatgaggtagataataatcactttgttaattataaattactatacaaacaaaactttgataacatacatattaccacttactattgagcacctcctagttgtctgagtaagcaaaaagtttaagacatgcttccatcttttagaggacaaactgtttggctcttaatgaccatagcatctttctgcattaataatttgacgaggagctcagcactcaggaggccaagacaggcggatctcttgagtttgaggccagcctggtctacagagcaagttctaggacagctgggagtacaaagagaaaccctgtctcaaaaaaacaaaaacaaaaaccaataataattcagtgaaggctggcatgtatctcgattagtagagtgtttgcctttatgcacaaagacctgggttcaatctctagtgcaacaaatgtgtggcacacacttgtaaattcaatacttggggaggtagaagcaaaaggatcagaagttcaaagtcaccctcagatgcgtaaggagttcaggccagcactggctacattacaccctggcttaacaacaaaattgtaaaggttttgctgttttgtttttttaagatttatttattatgtgtacagtgttctgcctgtgtgtatgcctgcaggccagaagagggcaccaactctcattgcagatagttgagccaccctgtggttgctgggaattgaactccagacctttggaagagcaggcagtgctcttaaccgctgagccatctctccagcccccccccccttttttttctgggactaaaggcgtgtgccaccaaatgcctgacaaaaaaactgtgaagttcttaagaagcatgaggaagcacaatggtggtgaataagattcatattgcctgggtttctctcaaaaaagaaaaagaaaaacaaaaaagaaaagaaagatggaaaggaactggtaaagaaagcagcttgtcacttgtgctcaatacctctcaacaaccagtgttctccagaaccctgtaagggacattttctagaacagttcaggtcacctggcagaacagtgctggcctcactgtggaggatttatttcagggtcctccagactggggcagatggctacttcaagttgaagctggcacagaaaacatagcaggctgccatgggagttgcagctcacatcaccctgaccttctagcagggaagaggcgacacctgactcctctgttggaggtccttggatataggatccaacccaagatagcaaccctgctctttaaggccccatcatgacccagataactcaggaactagcccatgtttcccatgtctcccaccagtggcaggtgggagccatctggctcttgatttgtgccaaagagtagaaggcattcccagcctaaggttcttccacttgaactatgtgttttgcaactccacttgaccttacaggcctctggaggggtgttgggcagctgtttctgggccagaagttaccccaaatgtagtatttttagaagtctttttttggagccttctctgcccaaatgggaacatcttcttttccctccctgctatccagatggctctaggtttgtggccaactctcccaataccctggcaaccacaaacacttcaaaacctggcctctcctccaccttagaggcttgcctgggcctttactcatcagccctgaatcacagaaactctggaactgcagggaccttttttgagcctgagggagaacaggatttgctagagcctttgacatttctccagcagcgtggcaaaaaaagaaggtgctgcaaacattcttcttgcctgctcctcacctgcttcaataagttgatacttgctggatcttagctcatccatggcatcctgttatgaatgagatcagagcagaaagcacaaagtgcttgggtaaattttcaccgtattttcctgagatggttggtagatgccaagtgcgttttagcttatggataatctattatatggctttatcaataacttcaaaattgaacacagcacaacagagtggttatggacaaaggagtgctcgatagacgcacttgaattcacagccaggttttcccacatactgcctattcttcctggatttcatcatcaggggtaacaatgcctacctgggtaagtacctaggaggttgagattagtgcagtgcctgctttttgttcatgataatctttccttctgggctgttccttaaccccttgcttattttggcaggaagttgaggtcattttgtgtcaatggtgtgatataacacacacataccagcactttgcacgaacgctccccctcaaacacacacacaaacacacatacacacacacacacacacacacacacacaccagaagtttgattttcatctgtcttttctggtccagagctcacatatcccttgtaatttaatatatgggatgatacctttttttaaatcattagctgtttgacctgactttctgcaatgtcttgaaaaagctccctagctaaccacagaattggcggggaaaattgccaggggaccagccatgtcttaaagagttggtgcctctgaggaggagagtggctaatgattgaattgatcccagtggccccagatttggtttatcatacttatataatgaaacttctaggggaatccagaaaagacagggtttgtagcgcttccagattactaaacatatagagaggcctctgagtgtggtacactgggtagggcatggaatctctgtactccttcccccatctcttgtgctgccatctttacagctggtgtacatcaatatcctttataataaacatttgcaattattcagccagtgaacctaagtgtttccctgtaccaggcttttttttttttttttttttttttttttttttttttttttggtgtgtgtgtgggggcaccaaccaggtcacaaatcatgacacagacttattagttatgaatgctcaaccttattttatgcttgtcccgctaactcttataaattaaattatcctgtttgtcttccactaccttttgcctcagggctttttacctttctttcttctgtatatcttactttcactgcttctccatatgtgtctggcagctgcctgctttctggctccagtgtgtcccttgttctctccttcttcctctcctgagcctagatttctcctcctacatattctctgctgccagccccgcctatcccttttctgtctagttattgaatgttcagctttcattagaccgatcgggtgccttagtcaggcaagatgcaacagcagcacatcttttcataattaagcaagtgcagcataaacaaaggcaacacatctttgcctagttaaagtaatttctacatttcccggaactcttgactctcattagcccattatctgaacccgataaaggggttgtaggaaccttgacttatatccaaacagagaacagataaaataagctgggacttggtgactggaatctgaggttgtgaacacaggtcctgcctctcattgcttgaaagcaaatactcaggagagagttggtggggaggacatcagattcattcagggcctattgacctcaaatctccatcttatagagtgcagatacataaaagggttttgtagagagtaaatttggagtggtgggggtggtgcatgctgagtggggtcttctcatccaaggcatgcagctccctctttttttccttctggccagaacatcatgatagatcttgacttcaacctcctggggctagttcctatagttcttagagagacattacttgtctgtaaattagacttcatagccatttatttacatgtttcttattagttgaagcacagaattaaagaacaaggaaggatattatacatcctgacgtaatccaaaagtcaccagaagttatggattctttaaatataaacattatttagcagttatctacctacctgttttagggtttgaacccaaggccatgcacatactaggcaagccatctgtctatcattgagctacctgtccccggcaacagctaacattttaatcattatggtacagcttctcttcatatgttagtaatatatcagtgggcaaaagaacaggaaacaatcttgaaaaggagaacccaccaaagagcgggcacattatatagctgtgttaaaccacatgattggtcatgggaatcaattcaatcattagccaccattcttccccagaggttaaagatgaaagtcttatccctctaaaggcgtggctggtcccgctggcaattacccctccaatcctaagttatctggggagatctctaaaaatggtcttattaacataaactgtatgttgaaaagggctgtctttcacccttcatcctctgaagatgttgcaggaagctggctaaaaggctgtttactttgacaaaaggtatcttttctgttctttccttatattaaattatataagatgtgagctctaagccaggaaggatagatgaaaaccaaactgctgttctccctccctctctccctctctctctccctccctctctctctctctctctctctctctctctctctctctctcgctctctctctctctctctctctctctctctgtgtgtgtgtgtgtgtgtgtgtgtgtgtgtgtgtgtacacactatcatagccattgacacagaatgacctcaacttctcactcccaaacaggcaaagggatatgactctgcctccaggtaggtagtgtcaaaaccaagttgaattagaagatgtccagtgcacagtggattgcttgtttgctggggatgagaacagaaaaaacaaaacaacaaaaaaacctcacacaaataaacacaaatcttacgtggactgttaagtgatagtataggagaaacagagtttagcctttctctatattcttagaatggttctcaactttgaatagtccaaacattgaggaactcatgtccaagaccaggtcacagagagacaatgccatcagaaccagtgttcttggacacagacattggcactttgtgccactttcaggtgatgtcactgaacagtcctgtttgagatccactgaacactctgacccccagcaagggtaggatttggaagaagaggcttggcttgaaatccttctaaacccagtgaccttgcacaagtgctcatctgcagactgtttcttaatgtctatgcccacaggggcgagggacaaaaaataccttgcataacaaccctgctgagatactgttgcaaatgcagtcattcttgtatgctctgttaaccaagtgttttattttacattggtaatgtacagtggtaatcctacttacgagctatttttaagttactttttttctatcggctttgtcttcagtacattataagcttcttgggaggaagcatttagagacttgtaattcgctcacgtccatggtgcctaagacccacgtggagacaggccttcagattttaggcctgcaggaatagactgcattgagatcttgcctatcttgaggaagctgtgaatcagataattgtgccagtttagatcgaaagtcctgcttcatcttttttttttttttttctttcagcacacagctccttttaggtttgactgggatgcttgctatggaccagggatggggtagggaatggcagatcagctgggagattaaaagtatccatcaggtctggatcaccacttgtttaccttgtggccctctcttgacagacacaaacatggcaggctcacatggcagtccatcatggagcaggcatctgttcaaagctgtcctagtggtcctcgtgttcgtcctcctcttccactcatcgtcatcatcccagtcctatcgagacccacctggccaacagaagagggaggcctcagctgatcttttgacccagattggccgatctctgaaggagacgctggatacctggctggggccagagaccatgcatgtgatttcagaggtaaagaaggtgctgtagtgttgtagaatattattttaaggtgtgtttatgctctggaacatttgtataatgatgcaaagatgtttttgattaaataaaattcacctgctgtcaggaggatgggtcagcaactagacaggaagttgtagggaggagccaggtggacaagggtttataaagagggggcgagaaaatgcacaaggacttctccagggactcaaggaggtgaactaggtgagctgcttgctattcagcctctctgggaagcagaattctacctcaatctttgaatcttgagttctttatcgggggcagagatttaaataagttttcttagtagctttgaaagagttggtgcatgcggacacagaattccctcagacttcgggctcttgcatcttaaacgctgctgatagcagaagagttacagttgctttataggatagctgaagcttaaaaggcaataactaaaaacaaaaacaaaaccactgtagtggctgtgtgcataaacaaatgaagagacattgttaacgccaccttacctttgccaccacaacctgtttgtcctagtccacactgtggagagctccaccttccacaaatacagcctggcagtcctgctgcttgcttgctggctgattgcctggtttttaccttctggccttttagcaccaccctatctttttccagtttttgtccattttgccagaaaggctgcaaaataacctactcttacaaacgcaggttagtgggtccccaaggagtctttgatctgatctgagtcagacctagcatcttttttttttttttttttttttaagcaggcagtgcttttttttttttttaagatttatttattattatgtatacagagttctgcacaacagaagacagcaccagatctggatggttgtgagccaccatgtggttgctgggaattgaactcaggacctctggaagagcagccagtgcttttcacctctgagccatctctctagccccgagacctagcatcttaaattggcagtgtacagagagctgagtttaagtcctcatctgtaaaagcgaaatggggctcatgaagagtctatggaaggcttggttcttccacccagtgccttttctagtgtggtgtcccttctgatatgatagttcataccaaagtgcccagacagtggtttataaaatccacaatatagggccggggaaatgccagtgggtcaagtgcttactatgcaagtatgcagataagagtttcagtctctagaacatgtgaagactgggcatgctgtgaatgtctgtaaccttccgcaatgggaaagtggggtgggcagaaacaggcagacaccaggagcttgctggttggccagccaggctagcagaaactagagctccaggtttagtaagaatcctgtctcagaaaatagagaggctgctcaggatttaagaacacttgttgctcttgcagaggattagagtttggtttcaacgaccctcaggtggttcacaactgactgtaactccagcttcagggaatccaacactctcttctggcttctttgatcacatccctaccccctcccatacacacacatattcataaacaaacacacatgaatatgtaaataaaaataaaatctttaaaaatccagtggagaattgaggaaggcatcctgatgtcagcctgcagtctccctgtgggtcttcgagggcacacatgcagacacacaaacaaatccacaatgcagtgcagttgattgactccttttctcacatgtcccagctctgcatggacattctttcacactccttcctgattccctaggaggcttggaggcctccagttccttagagtgcctaacatgggatatggtgattccccctttcacacaaaagtgcacctcctgccacctccagaacatctcagctgagcaactgaagtctgtctcaggtgttctggatcctgggtcaggaaggagacatgacagaagggccccctcatcagactcagagtctggggacttttgacccaagcccaagtcagagatctccctgcaggtagtctggaggcggtgaggaccaggcaggaggagaagagcctcattcataatggatttgtctctttcacagaccctgttacaggtgatgtgggccatctcatcagccatctctgtggcctgctttgccctgtctgggattgctgcccagttgttgagtgccctggggctagatggtgagtggcagagaattagatagccaggctgtgtctgaccttgctgttggtgggagtttatctgtgtggggctagacattcccccagctgtttgcagctatcaccagagaagtacagtggaaggggaggctagagattcttcctctgtcccagcagtttacttgtattgaacattgtacaaaggtgtagtatttcctctctggttaaccaaagccctggaaggcagataactgtcctcatataataaataaaactccatctccacaagagaagtagtcttccaagagtcccacggccaggagcctgggattcaaatcggtttcccaagtgtgtaacagtgggctgtgcttttgcaaggctgttgttccttctgtttcatcatttcttgcccctctttgccctcatcacacctctagattgctgactctgtccttttccttttcaggtgaaaatctcacccagtccttgaagctcagccccagccaagtccagacccttctactgtggggagcagcagcactggtcatctactggctgctgtccttgctcctaggcttggtcttggccttgctaggacggatcctggggggtctgaagcttgtcctctttgtggctggttttgtgggcctggtgaggtctgtgcctgacccctccacccgggccttgatgctcctggccttgctgactctctatgccttgctgagccggctcactggctccaggggctcggggacacacctggaagctaaggtgagagggctggagcgccaaatagaagagcttcgagggaggcagaggcgagcgaccaaggcaccccggagtatggaggaagaatgacagggatatcccacagtgacaccctcatcataccaaagagctgagctgcttctgggtctcatggccctccttgcagccccttgcccttgccttgcctgtgtccaaacccttcacccctttacccctgcactagtccctagctgagagaagagaacctgccttctgcaggtgctcagtcaagggatggctccctgccccttttctgctcccagcctgcatcccccagggcaggttggaggggcctcggctccagcttctgctctcagccagtaccactgccactgatctccatgatgattaacctgctgctgcctggcttccttacaaaaggcctttccaggctgaagctaccatttcaccacactccagctctcttcttcctactcagactcccatcacaccaccatcccaagtccctcaagacccttgctgccttccttattgcacagcagtgggaagggacaggagaggctagactcgaggataagtgagaaacagggcccttggaggcctgcacatctgggttctgttacaagtgccttaatgggagtcaatagcaccctccagttgccctttgccacactgaatgtaggaaagtgtgctatggctactttgtgttcagaaagagtagtcccttgcagaatcccaactctcctgcagccaaagcaaaggctagctctcctgcagctggggccctgtgggagactgtcaaatgtcctttggggatttcagggaccttgaaaaaggcaggaggacccaatgtctatttctcctcctgtccactctgccatcccagcagctgggaagagcatggcctggccctgatctattctatggggcccagggggagcctgccactaaccctctccaccagggcacttgttcagtcttggccttggcctgtaaagccttcctggaggaaggtgtcctgtgccaggtccaacacaagatgtgaaaaataaatgcccattctgactgataaggtttgatgtggaatcatggttgcagtgatatatatatatttgtatcagcgcttggttggttttaaataaagtgcacgctattttattatcttctgaataaaatgtattcaaagtctctcctttcagactctcttctctagcaggaagctgctggaaggaagggaggctcaggaaggcaggctgtatctgattcccctccctccaggaccttggagggaggcatgcacactcttgtaaaacttgcagatctggcagcagtgtgggggaattgaaggtgctccttcccttgggtgccctgttggcctggggagccaacgaagactgactttccctcccagactcaggaatttaccgcaccaaggttttcactgtggctccaggtggttctgctgttttgtagacggcccaggcatgtctgtgcttctttttcctttttaggttgccatggagataccagctcttctggatctctcccaacactacctgggggcaaagctgggcgggacccaaagtcaggtctccctcagaagggttgaccagcctgtacccttcaccctttgggtttctcccttgggtggggctagacggggaaacaagctgtctccacacagctgcccagagttgtcagcctgcctggtttggcctgtccatgtctgcgtcccctccccgcccccgagcacagctcttttcccctatgtccccgaattctaactctgattctaaagagagatgcttttacatctgagatgcttgtgaggagggcatgaggcaaaggaaacgtttcttttggtttttgtttttttcttgatcatcagcttccaagagaaatcccagaagaacctcagcttgtgcctcctggcagaggccatcaatctgcacagtctccaggggagacttcttctcgactttaggcgcgggggcgctctgggtttgggatccgaagggcactaggacccggcaggactgaggggacagcccatgtgcctgcgttccctcccaccctactgctcccgctccattgtctgggaactgctgccgcgggcgggcagcgcagggaactggctggccagaggggccggcgcggagcaggcgcgggagatgcgggctggatagcagccacctgagctgcgcgcctggaacccgctttctgtgggaaggatgtgcgcctcgatggctggatgcgcggctgcggcccctcgggggccctacggtgcctggctctgcctcctggtggccctcgccctggaagtcgtgagaggtcagcgggaagggaagggaggggaggggaggggcaagcctgctcggccgaggccgtgcgccagagatgcccctaagcctttgggccctggaactaaacccagagaggtgtcttggagagatccaaccttgggaaaccggttcccagctagctgctcttttgccttccctgggcaccacctggatactgctacctgagcctaaagtcttctcattcccatcttcacctgcccggtcccaactcctctgcaagcctcctctccagccccggcttctaaccctcttcccagtgcaccacccctccctaacctgctgttttagcccccaccagcctgcccgcgagtcacaggaatgcaaaacagcccctttgcctgggacccgagagatgtgcgtctctctccttgtcccaaggagatctctgaccttggagtcttcagggagagccccagcctttgcctttccgagcccttgtgggtgtacccatcactgggtaaggggcagcagctacctcgtgcctgacacgagctagggctgaaaggtggaatatgctacgggagactggaagatggtggagcatcctatcctcctgccccaccaagagagctggactcccaatgatgggacaccatgggagcctgtgggagttgggctactgagcatcttgtaattatggaagcagtgaattagaaggtggaccagagtcatcccgggggccggcagtcactcacttgttaccctcagggatatgggggtggtgatggtagctctagggaagatccccgccccctccccatcccagctcagctgtgtggctgagagtgagctggttctggaacttgtttcaggcacctgctccccaacctgcagacccagtgggagccttaataacccctccacagtgaggggagggagggaagctttgtcacagccattctgctcaccaagaatctcacttcccatgggattctacagcaatttacaaagccctttcctgcccacggggtcacgaaatactcccacccccttttccactgaggaaacctaggctccaagatattggtgactggccagtctttcctggagtacagctaggacatgaagtcagctctctgggctcccaggaaacctctccagggagagttgagggaattccagaatgagttaagacagagccaggcacatcgtctgtacttgtggttccaggcactctggagacacgtgaggattgttcccgatctcagaaaggcagtagcaacaagcagagccagaacaaggtgtctagcaaggggttaaatgatcacagaagtctttctcaaggaggcaccgtttgctcttgaccctaaaggagggtagaggcacagttagggggtgaagcccatgtggcttaatggtgtttgttgcattggatggaaaggctgggtaacctggcagtgaattcctctctagtttctcaggtctaccacaggttggagaacgctcacacatcagtttctaaatccattaagtagagattgtagtaatagaacttaatccacagaactgtgtgagagctgaaagagttaatgcatgtaaaaatgaatctgtgtggggttaagtgctttagaaattgttactctttagggactgtagtacaaatcaatatagccttagtgggcctttgtggtttttatgattgaatattccatctcctcaggcttatggttcccacccttagtgagtgccaggagcctcatggacctctttggtaccctccccacgtcttactcccgacccccgacccccaacccccaactggggcagggaagaagggatcaagtttggatatttggtgtgggtgtgccatggcaataactggaccaaaggacccagacacaacaaaagtctcctttcctacaaagctcgactcacagtctgacttttactgaatagatgccagtgcaggagtcctgccctccaaatacctggtatctgaggcaggtgggtagtacgaacatgtaggggagattttaaacaggctctgttggagagagaggcaaggtctgtgaaaggtagaaagaatggctgggaagtttacttccaatccctggttctcaaactcattgtgaggctccctgaaccttggtcacctcatctgtgaaatgggattattcctctacatctgggagacagcacatttgtagtttccccttctccaacccagacccacagtgaggatggagctcagttcaatctccgctagctccagagccatcccatatctaccccttattcctcttcagttggcagtaaccaagacaccctggaccccatctacctgccagtggccctggaactcctggatgcccccgagcattttcgtgtgcagcaggtgggccactacccacctgctaactcttctctgggctcccgttctgagaccttcctgctcctgcagccctggcccagggcacagccacttctccgggcttcctacccaccttttgccactcagcaggtaaggatagggcccagggactcccaggcaaatgacactcatgtgttctgttgtttgggctcttattcccctatttaagaactaatcaggcccaatcctgcttaactcctgaaaccaggcaagattgggcacatcgaggtggcatggcttttcccattccctacacaggaagactgaggccccctaatctcctgctacactgagattagaagcccaccttcccatacctggccatcgtgttatctgcctctcctccctatcctgcagctgagcatccttgctctttttcaggtggtccctcctagggtcactgagccccaccggcggcctgtcccttgggatgtgcgtgctgtttcagtggaagcagctgtgaccccagcagagccttatgcccgtgtcctcttccacctcaaagggcaggattggccaccagggcctggcagcctgccctgtgcccgactgcatgccacacaccctgcaggcacggcccaccaagcctgccgtttccaggtgagtgagttctttctgctgctgcaccatgcaggtgtggtgccagggtggagaggacaggactgtactacagtctgggaagtctaggggcatgagccacccgactccgttttggttcctgatagccctaggagaggttcccttgaggatatcagtccatggggcatgactttgggcacataacttaatgtctctaaggctcagtttgtttgtttgtttgtttgtttgtttgtttgtttttcttatctgtaaaacagactgacaacagttcccacctattgggagctggaaaagaaataaatgagacaaatgtaagagtcactgtaacagagccatcagcctttgtgcgtagattgtggagtcaggcccaaagacccgctggtgaggtctgtttcttgctctgatattctgggctctaggtaggttcttggatgtggtcaagattgtcccattttgcttgacctacagtattctgagccctagacttggtgggtccttagtttattgtggcacatgggaaacatctttggttctgcctttcatagacctctccagcttaggtttttctgccaatggagaaggattcctttctacccttcctagggccaatcacagcctttgccttcattgtatttgcagccatctctgggtgcttgtgtggtggaattggagttcccgtctcactggttctcccaaactgccaccacaagggctgaactggcctacacactggagcctgcaggtgagggacctgggggctgtggccctggcatagaggaagagcagggggagcaggctctcccagtgggtggtgtggagctgcaccccgcagaccccccacagtaccaggaggtacctctggatgaagcagtcactttgcgagcacccgatgtgctaatgcgacctggccagctcttcactgccaccctcctgctccgacacaacttcacggccaatcttcttacccttcggtgagtgctaggcctccatggtgggagaggggatagggatgacagcaggtagctattttttcctgcagtccttgctggagctcttggcctccacaaaccatgagttctgcataaatgttcccagcagagagttgcaaatattctgggcacagcccagaagtgggaagcctccctgggactttaagtcctgtggtagaggaagtctgagagcttggagtgtccagagctaggctatgctcagatgctgacaagatgggtatcttgtctgggctcgagcatccatagggtcctctacttgctactgttgcttgagggggactttggacaaagcccgctcctgccattcaaagactcccattctttatgtccttttctgtagggagttacaccaaagcatcctctacccgacccaatgaactgacaaggatctgtagtgtaacttttcctctaccatgggcgagtatgtgggagttccacccgacatgtttccctacccttcatgcccactcaggctcactcatccatggactctacagaccttatagtacaagtcctgtgtctccacaatggagttgtacagagatgcaagatccagtgcccatctataccaaggactcgaagacagggcatgaactagattaaatagcgtttgggggtgggggtgattggatgaaggtatgaagtaccctgaggacttgggcgagttggcagagtaagggggaagccatttactaccacctataagaaatagtatttgggaagaaaggcagactaggctgtaggtgcagtctgagcaaaggcctggggtcatgaatgtgagcttggctggggagggacaactcctggtgtagcccaagtccacaatatttggagagatgtcactgcccctattgaggctgagtcaggacctggagactctggaatgccaggcctgagcttcatcttgtgggcagtagagagttataagtggctgttggatggtagaagaaggagtgtgatgtagcctgtcttgaggtggggtccttctgagaagactagaaagagattccagttggtggaaggccagacaggaagttgacatctttagctctttgtctgcctttccaacacagtctgtaactcagtctccatcttgaccaaaacccgtatgctctttgcaggatcaaggtgaagaaagggctacaggtgactgctgcccgcacagcccagcctaccctctggactgctaagctagaccgcttcaagggctcaaagcaccacaccagcctgatcacctgtcaccgtgccggacctgcagagccagatgctaggtaggcacaaaagatagttctagctctagaatgctagagaacaggtttagggggtcctctggatgccccccaccccagtgagcatttggggacataaatcagtggctctatggatcttaagaggggcttggaggctaagttgggctctgtagccaggtggaggcttaggcgctgtcactttacattgtgatcttggcggagctacgtcatctctgtgcctccatcttcttgtcagtcaaatggggttaattgtagaggttgcttatgaacacagatggtacctggcagctggcaaacactcagctcttctctcttctgccagcagtccccttgaacagtccgagttcctgtgggtggactttgctgtggagaacagcactggtgggggtgtggcagtcactcgccctgtcacgtggcagctggagtacccaggtcaggcccccgaagcagagaaagacaaaatggtgtgggagatcctggtgtctgagagggacatcagagccctcatccccctggccaaggtaagaggctaccatttgtgctcatccccatgggaagcctggtctcaggaaccccagaaggtgagaaccctgaaactaaacgacccttgcaccctcaggccgaggagctggtgaacacagctccattgacaggagtgccccagcgcatccctgtgcgtctcgtcactgtggacagtgggggagccctggaggaggtgacagagcacattggttgtgagtcagccaacacacaggtcctgcaggtgagtggcaacactcgtgtgtgtgagcatgcgcagtcactcacatagctttgctcctttcagcagtacgtctccaagagaacagcttctcaaactcaaacttcatggcagggttgtggcaccaattaactttctttctttctgtctttctttctctttctttcttccttccttccttccttcctttctttctttctttctttctttctttctttctttctttctttctttcttcctttcctttcttccttctttttttggctccaatcatctctctaaagtggtaactctgaaagttcgaccttaagcttattgctatattcattgtccatcgtccattttggcgctagccagggagctgagctggaagagttcatgtcctttggaatcaggaagtttttgtggacacctgtgttagttacttgcctcactgctgtgagaaaaccctgatgaaagcaacttaaggaaggacgggtttattctggcttgtagataaggatacagtccattatggcagggaaggaggagcatgggagcttgaggcagctggtcatgttgtactgtagtcaggaaacagagagaggaatactggtgctgagaaaaaacggatttctcctttttatttagggggtgggggatggggcaggggacccagcccatggatggcgctgcccatatccaggatgtgccttcttacctcagtgaacccaatctggaaattccctcacagacatatctagaggtttgtctcccagggagttctagatctcatcaggttggcaatattaatcatcacagcccatctttgttatgaactagttgtgtgatcatgtgcaagtctcttcacctctctgagcctcaggtccctcaactctaacatattattagagttaaagatacctaagacagtacccagcagatagcaagaacggagacatcagcagttactactgttataatctgatgaatattatcataataatcactgtcttaatgacctgtgaagttaagagggtagacagctttgtccatcttgagttcttaacgaggaagcactgacccagatcccaggcagcagtgacagcaccatgaggctcctgggtgggtgggcccatctttcccttcagctttcaaccttagctgtagctggctgctagatgcctccagcagcaatgtccgagactgacactaaggagctaacattgtaagttcaaccctgactctgccaggaggaaggctgtgtgtgtctcatgcaaatggcccagctcgtctgctggagaaccaaattatggcccaatgcctctgggatagattttggtagcacagcaaaaatattttaaactaagagcagctgctgtccagtgcaccacaacacacatttctgtgccatacataattgagtttgagttgtagcctccttatggttggagtagatgatgctatatcaacgcctgtcatttgtgtctctgcccatctttgactctccataggtatctgaggcctgtgatgctgtgtttgtggctggccaggagagtcggggggccaagggagtgcgggtggacttctggtggcgccgactgcgggcctcactgaagctgaccgtatgggccccactattgcccctgcacatcgagctaactgacacgactctggagcagattcgaggctggagggtcccaggcccagcagaagggtgagtgtagctctgcaggagcccataggacttggtgaattccttctgggactgagggtacacagtggacaagtccacggaaccaggctggggtctggaacactgctccctgctcacctgcagtgccttctgatcattagttactttacatgttgctgtgacaaaccacttgacaaaagaaacttaagaaacactgggtttatctggctcacggttcaaggtacagcacattatggtggggcagtctagtggcagaactttagggagctggacagctcacattgcatccgaagtcaggaagcagagagagtgatagatgctggtgatagatgcttactttctccttttcattcagtagtggatcccggctgatgggaaagtactgcccatagttagggttgatcttcccacctcagttgccctcactgtcatgcccagagatctgtctctcagatgattctggattttgtcaagttgacaatattagccgtcacctacctttgaccaccagaaccctgaccactgtagtgtaaactggcaacctccctgtcccttctcccccaacttccttatcagccgtaacacatacaaattctctttgcttagttttctgcccattcttctccagctccacactctatccctgagagtgtttactactataccccgaagccttgaatggaccaagctccataaaaataaactataccaggtagtggggaggctcgccagaacctgaaggtgaggatgtggtgcctgggcctctcaaagtaatgtaattctcatgccctgtagaaacggagttgtcactccatttccttgtcaccttcccactccagagatatccagaaataagtgcagcaaattggatagaaaggcccattttaccgtaattcaactggggtctgagcagaaagacttgggacccggaagggagggtattcaggacaaagtttgaagaacaggaggcaaacaccagccacgcacctctggttactattgttgttttgtcatttgtgcaagctgaggcattaagcttcaattcagaacctcaaggtgggtggcaggccagggccttgctgagtttggaatttgggcaaggcgtggtctccagtgggcggagccatcactgacgccccgccccaccccgcaggcagctggagcctgaggccgctgttgaggaggcagagaaacgctcccggggctgccgcctgcagtaccagagagctggtgtgcgcttcttggtaccctttgtggcccacccgttggatggtggccgccgcctcacctacctactcggccctgactggctgctggatgtgactcaccttgtggcagcccatgcccgtgtgcaagatcctcgcatagcctccttggaaggcggccgtatcctagtgggtcgggagcctggagtcacctctattgaggtgagtcaccataggggacgctaaagagcaggactccgtcctctccccccagggtgccggtgtccccagaatgtccctgattaggtgtgaaggctgcagaaggggttggggagaacaggtctaggaggctgagtgagaatggcattcattgaaggaaatgctcactgcaggaaatgtggcgggtgtgaaggacaagggtataagtgtgtggggacaggccgtcagaagggcactgtcctctggtgtggattggagtctgtaagtttttagagtgtagaaatgctgggaaactgtgcaggagaccccaccaccaccaccccaattttcatttgcttcccactcttaggttcgttccccactatctgactccatcctgggggagcaggcactggctgtgacagacgacaaggtctcaatgctagagctgagagtgcagccggtgatgggcatctcattggccctgagccgaggcatgatccaccctggggaggtcacagccacgagctgggcccagtcagctcttccagctccaaagcaggtgatggctaggggtcagggagcatggccaacagctattgatgggggctgatggtggaggaggatgggagggagtgggtcctggtacttggaccagggttttcaaaataaggactacttcccgtgaggtagtgagttctctgaggctggaagtgatcaagcagtggctggctggagtatggcactgggaggttcattaggctctcctgaggactcagactcctgggctgagtggcagacaggtgattgacacgcatcccctctctccctgtgttttgtccatttgcctgtgtctctgtttcctctgtgcgctttcttccgtgtggcctgtcactgtgggagtggtttgtgtgtgcatgcatgcctgccctcgcgtgtctctgcctgtgtccgtgtgccctgcaggaggtggccctctccctgtggctgtccttctctgaccacactttggcccctgccgagctctacgaccgcagtgacctgggactgtcagtctcagctgaggagcccagtgctgtcctaccggcggaagagcagggagcccgacttggtgtggtggtgagtggagtaggtgctgaagggctgcccctacacgtggctctgcacccaccggaaccgtgtcgccggggccgccatcgtgtgcccctggcttcaggcactgcctggctggggctgccccctttgcccacgccagctcctgccctcccatccagtcctgcccggagtccaccattcacagaagccactgtggagggaaagcggcaggtagcgggtggtatggggggccatgtggacgttagaggcaagtttgagcgggcagaggaagaggctgggaaggaagaggatgaggccaaagaagaggaggaagacgaggaagagatggtgcctgcccctcagcgtgtcaccgacctagagctgggaatgtatgctctgctgggtatcttctgtctggccatcctcatctttctggtcaatggtgtggtcttcgtgttgcgctaccagcgcaaagagcctcccgacagcgctacggacccttcctccccgcagccgcacaactgggtctggctgggcaccaaccaggaggaactgagtcgtcagctggaccgttgctcctccccgggcccacccaagggggaggggggctgcccctgtgaaagtggagcaggaggggatgccccaaccgtggcccccagtgcttcagagggcactgttggctcctcgagcaccctggcccgcaaagaagctgggggacgtcgcaagagagtagagtttgtgacatttgcgcccgcacccccagcccagctgccggaggagcctgtaggggccccagctgtacagtccatcctggtggcaggtgaggaggacatccgctgggtgtgtgaggacatggggctgaaggacccggaggagcttcgtaactacatggagaggatccggggcagctcttgactactccctggcctgccaagtgcagcttcagccaccagcccaggcagtgggaccagtggggtgtctggctggacttcttgcctggcccttatgctcatcctctggtgcttgttgatccgagtcccctgcttgggtccccttgggacccaaggtcccctccgaacccaggtcccctccaccccatcccttgttgtggaccatggtcaagagggagggcgcatgccccttatttatgggaaccacttcattctaatgttgggtacagaataaatgagaatgggtacagccagttctgatgtgacactgtctatccgtgtgcttggagactaagtcagcccctgactctgctggatgagctctgggaggctgggtcctgacgagtcctctcatagcgaccagcaatccagagaaacaggacaactgtgacagcctgaatgccggctagcaggaagaagtaaaggtccatctggcagttgttgatgttccctgtgaacaggaagactgacatgtaggtagggaggggctccttgggctagcagctaaagccacacaccagtgagtgccgtctgagagcactgggtagagagccctctagtattgaaactccccaagtgtctcttggtgtatctcctattcctctatttggagacttgaagcaaacaccagggaagaaagtgaccactcatcagtcagtcatggctgagttccagaagcaggaaggtgcctgtgagggccactgagtctaaagcatgactgctcgtcccatccctataccgccctccattcctatcctggggagggttccctctcactcaccgaagtccttggggcagtacatccagcccccaggcaaggacagtagggccaccaggccagagcccagcagtgagcctaccccagaaaggcagaagaagatacccatgattgcaccttgcatggagcgtggagcttctgagtaggcgaactccagacctgtgggagagacagggaaggaacttgggctgcagcaggagcagagatgggccccactgtcaaactcccagtatgggggggaggtgtcatattctcctgcccgcctttccaagcctctatcctaattcccttggatggtgtgtccccatgactgatagcacctgcatacctgtgacgtgacacattttgtctgccctcctcatccacatctgatagagcactccctggacatcacaaacaccaccccagagctctattctacctcctgggcatcccagtgatgggggtaggttccatcttagcagcttcttcagcttttccctacttttttccaaccttccttccacaccatcaccaaatcatttccattcagcatctaaaatagtatccaaatgtaggctctgctgggcaccaacccccttttccctcatcacccacacaaagctgagtggctctctgatttattattattattattattttatttttttgagacagggtttctctgtgtaaccttggctgtcctgaaaactcactttgtagaccagtctggcctcaaagtcacagagatctgcctgcctctgctggaattaaaggcctgcgccacaactgcctggctgtctggaactcggaggcttccattccctatatgattgatgggaggaccgacgggtgttgttggccttgggagaattcatccatgctcagccactgggcccacagtgactccctctccacactctcccctctccagtgcttactccccgctgtgcctcctggttcatgctgtcctcactgcactggagggccttcccatacttactggcttcagcttgcccattagccatctccttaacccttcccaccttactctcagcccggccacactctgcagcctccagtccagcactggttggtttttgttgtttgtttttgcttgcaacttgagttcatagggtcagttttatcatcaagatctagaattcccaccatggcctagagggaaagcctacccaaacttgcagttttggcttcctgactaggttgggacagggttggtgtgtgtgtgtgtgtgtgtgtgtgtgtgtgtgtgtgtgtgtgtgcacgcttgcacactgtaggacacagtgtgaatcccagaagggaagagcacccagcccaggagatttttgaggaaagatgcagaaggaacaatgaccacaaaggcaaaagataggcagaatccagggctcaggggacatataggaggtgtcttttaacctctaactcccaagggtctgatgcaatggctggctcaagcctgaacccagtgctagaaagtccctcaaacctcactggagcagacacagaccttattcagaatcactgctccctccatacagaagccagaatgctatctgtgccggtcggtggttccctctggtctggaggtacatacacccaagcagagcttagcaccagtgtaggaggagctggggagggaatccagcatacctgtaatgctggcaaaaatctcactgatcccgatgagcaggtactgggggatttgccaccagatagacagtggtgccgcatagtacaagtcctgcccaatcagttgaggcactgtgtggttggcagcaatgtacttcaagcgctctttctccaagactcctgggggattccgggtggggagcaacagagtacagttagaccaccccaggcagtttagagtttgagttccaactctttttttttttttttttttgccttggctgctaggaagctcagctaggttttgtattttgtaggagttcttattaatccagaatctgttatgacagtctttgcaaatgaagaaagtgaaactcagattgagcaatcagcccagaatcacacagtttataagcagtcagggctaaatcttagtcccagtacatctggttttcaagctggcctactttccttaagatcacatgacttctctagggcaaggctaggtattatggtagtgtttccagcctggattttaggttcattgtcttctccctacaatgctttggagacatctttgccctgatgaacaaatcacaatcagatagggcacttgtattctagttctggcccttccactggcttgttgtgcaaacccaggcaagttacccaaccttttggagacttcatccccttacccaagaaccaatacaatccccgagattactgaggccaaaattactaggacaaaatactaaataaataagatagtcacaaaagaatctagtttgtgttgcacctgatcaccaagacagtgttcctttagctttaatttcttcagcctctatttatttgcttatttatctttgctttcagatggtctcatgtagcccaggttggcctcgaaccctcctgagtgctgaggactacaagtgtgcaccactacacctagtgcctttcactcccttatactgtgtcttgagggcagagctctcactcagggtctgaatgaacatggtatatcacacacctgctgcaatgatggaggtgaacccaaagaacatgcccagagccatcatctgcagagctgagggcagcagcagcttgcaccgaagcagtagaggatcaatcaagtggtccttgacagggaccagaaccagtatcaccacaacattggccagcaggagccaggcttctgggatctgagtgggagagggccaggagagacaggttggctgagcagaaagagctctgggctggacaatgcccctgagtaacccagggctagtgctcctgccccacccttattccccatggtactcagctttctcagttgtgtaactagaggacagggttatatcagggaaggcaaagttcttcctggatacaactttccattgtgagtgcagcatggaaagggttccagggaaataggggaaatggcagcactgaagagggacctgtgtgtgcactggggggtgcaaactggacagtgagcaggagcatgccggggacacctagttcctgtgggcagctgaccatgctgagagaggggctgctgttgcatatgttcctccaccctgctggttattctcttgtctcctaagcatgccacatcactgaggggttgggggtctcacaggatgcatggctgggactgaccacacacttgctctcttaccctgtagtaactctttcctgagctcagagacgaagagctatcggtagggttggtctggaagatgttggggatttggaggtggagaccttgcaggacgtaggtggactgcatctgtggagagatagagacaggtcagggtggagctggtcactggacctctgaatccaggaggctttggagcgtattcctcagcagcattcctgggcagctggcccttccccagtcagggaagggtgctcccaacctgcttctcactgggaggcagctttggggatggggttttctgatgttctcaggtcatgagcagtaaccacaaatttatcccagagcctggccacagatgatcagatgcctttcccattgtgtctccagatcctacatggggtaggggggtgggtatgcataagtgtttattgaaacgagggaagataatgacatggctatctctactgggagttgtcatatgacactgaaattgagctgagtccttagcgttgacataaccagtgtagaggtactgatctgccagcatggcttttttttttttttttttcatttttggttttttgagacagggtttctctgtgtagctttggagcctatcctggcactcactctggaaaccaggctggcctcgaactcacagagatctgcctgcctctgcctcccaagtgctgggattaaaggcgtgtgccaccaatgcctggcccagcatggctttggacacagctgctggaaggaacaggtttggtggccctgcctctcaatgtaccagacactggtactctagctgccatgaagtgcaggggttccaggagactccgagcaaggggaccatgcaaggggaagggacactctggggtcagtcagggcagcagccatttgttagccgctgtggaaggatgtcaatgtcctgacagcttgtatggacatcttccccatgttcctgcatcctgtgggacagtctgtgctaccctagaccagtaggctatgaccctgtcttaggctctctccaatgaagagggtgcgggaagtgacggccttgttacttgggggttagggatggattatgttgtgggatatttgtacattacgtgaaaatgtattactatgattggtgtaataaaaggctgaatgaccaatagctaggcagaaggcataggaggaacttctggacagagagagagaactctgggaagaaggcagagttgccagcgagactcagaggaagcagcatgggcagtaccaggtaatgagccatgcaacagaacatagatttaaaataaatgggttaatttaagctgcaagagctagtgggacaagcctaagctaaggtcaagcttgcttatatagtaagtctcaatgttgttatttgtgctctggtgacccaaagaaaacttcaactataggtaatattagactgctgccctggctccacacatgtgaaagcatgtaaggaggaaatgctgctgcagacttctacagcaagcgctgagcccatgaggtgctggggtgccaggccccagaccagaaggcagaggcgcctacctggaaatataccatccagtaaggcacaagggtcaccatcacaggcaggagcttcaccagcacctggaagttggccatgtcttcctgtggagaaggaccccactggagagacctctggtcaggcagcaggtgggcaccttcagtgtccctgtaaggccacaggaagagaaaaagagacaggcacaactgagctctctctagcactaaggccaccacctcaaccatcctcctcccaggatccccattgcctcttcagtgagatgactcagccggtaaaagcattggcctttattctgagtgtaattcccagggcccacacagtggatggagagaaccaattcccagatccctgagaatcccagccactgctcccctccattacactgtaaaggcctctaacaccaactctaccacccttcctgccacccccactagtgatgtgatcaatgtcacccaagctgtcaagggtggcataagactttcaccactctcaaactgtatacagttctcgggttttgtgcagggagggggacggggtggtgtgtgtaaaaccagagagggaggaaagcagagtcttcagggattttgttttcatttctgacttctgacttgtgacatccatttaccatgagaaccacggaagtcccaacacaaatccgactcagagtcttccagatttgttgtaccccaattcccttgctgctgaccccaagtctatcctcagtggacttaacagtgaggtggagagtagagagtgaaaaggcagagatggaaggagcttcaccaagagaccagatagagcgacctttaccctttgccctcagggtttctgaacctttctcatccaaaagccctgagctgtcctccgagattccagaaggaaaatgtccagctggtctccttcagggacggctgccataaactcctcccctcccagccttcagtgctgttcctcatcagtgctgtggtctgcttctcttgccagatccaggctggctttgtgactcctcagtcaatagacagaggctgatgccatgctttgcaaagtctaagcccctgcagcccttaagaagacccacagcttcttctaccacccaccttctggaacattccttcttagaatgatcctttttcacatcccaaacaccatccccgagaagtgcgagctacagacgaggccacaggaaggggaaacttagattttcaccatccgtccccgctaagctccgagctcaccatctactaccactgtgtgagaatgttctagaatctagccctttaaagctcccaaatgacctggtgatgtcgagagcagcagaagacacgccctgctaaccaaccgtagttacccacagcatttgaaagaggatgaaaagctggtgcttgagtcggtaagttgcggtgtggtttgtgaaggcagtaacggctaattaaacccaccagactccttggcacctgtaacttcactgactgacctccagcaatccagcagactggggaaggctggcacataacccatttctctagattccactgaccccagctgggactgggtctggccagaaactagagacagatttgcttggcataagtggttaattttacacagtagaattttgttcaactataaagaacaatgaaattatgatatctgaggaaaatggatggaactggaaagtattgtattaagtgaggtaacctaggcttagacaaatactgcatggtcccacctgctcgctactatacatgtgtatgtatgtgtgagtatatttacacacagggaactagaacgggggttgggagagaagaaacaaaaggctttaagaaggggttaggaagggcaatagaacatgtgagaaaactggaaggaagaatgggggcagaggggacagtgaagagtggggacagggagaggaggaggtgggaagaatgtatgaaaatgccaaaaggaaagccgctattttgtaagctaatataaaaagagatcagaaacaattgtggtggggcacacttttaatcccagcactcgagaggcagaggcagatggatctctgtgttcaaggctagcctggtctacaaagtgagttccagggcagtcagggatacacagagaaacccagagcttggaggtacaagatggctcaataggttaaggcacttggcaccaagtctgacgacctgagttttagccctgggccccacacagtagaaggagagaactgactctcacgagttgtcctatgatttccttatgcttgttgtatcagacaaacagacagacagacagacagacagacagacagacagacacacacacacacacacacacacacacacacacacacacgtactgtgtggaatattttgatcacactctgacatttctgagactgtcaatgaagtttaccttgaattagagtgcagagttagctactacctgaccagaattatccatagaggttttggaggacccagaacatacagaaaaacacagaagttgtagggaggggcttagaaagattcaaggcacttttggatggaggaaagagagagaggaggtcactggtcacttctccacccttctctgagcaatcaggtttttaccccgatattttactcccaagttttatttaataatagaacaatatagtaattgcttcacatacatacacatataaataagtaagtaagcaagcaagtaaataacatttaaaaaccagaccagatggaaaggacagtagactaccaaacatttccaaggacacttggaatcaatttctctcaggtgggaactcatgagggagggagccatgacagttgctttctgaagactctgtttcacttaataacatggttgttttattctagaataattaaatcaactgtggctacacctttggccttttctctttgccctttgacctgattcttttcttgtctaagagccttgtgtcatcctttgtgactcacgaaaggataacaccagtgtagtcctctctaaagattcagatcatacctcagggaacttccctgtggccatcaagttacctactcatcctgattgtcaccggcagcccaccagcagtgcttatttttactgccagtcccatcatatatcaccactgtcctctgcatttcttctaaaaatttgagtgtgtatgtacatggtgtgtgtgtgtgtgtgtgtgtgtgtgtgtgtgtgtgtgtgtgtgtgtgtgcactcatgtatgcatgcatttctgtgttcagtacgtgtgtgcaggtgtcttagcttttactgtcaacctctttacacagcttgagtcacctgaagaagagagtctcaaccgagcggttgtccagataagactggcccttgggaatgtctatggggagatgtcttgatttttaattgatgtaggctcactgtggtgggagccatttcctaggcaggtggtcctgggcggtatacaaaagccagcatgagcctgagtgagccagcaagcagtattccttcatggtttctgcttcaagttcctgccctgactttcttcagtgacgggctgtaacctgagagccaaaaaaagccctttcttcctctaagctgcttttgatcatggtgtttgttacagcaacagaattaaattagaacagtacgtgtgcacattcctgtgtgaactggaggtgcagtgggtattattaacatggttttaaatttgagagggagtgttgcatgtggagaccagagggcatctcactgaggtagggtctctcactgaactcagggctaggcttttgaccagcaaactagtgatccttctgtctccaccccagtgcccccacccccccaatccccacaggctgggattacaagcatgtatgtgaccatgccttgctttttatatgggttctggggttttaaattcagctcctcatgcttgtgcagtaaatgctttatcaactgagccatctcccaagcacgtgtgtgtgtgtgtgtgtgtgtgtgtgtgtgtgtgtacaggtgcacatgtgtgcatgtgcatgtagaggccagagaacttttaggaatgctgtctgccttctttgggatgctctctcattggcctgcagctcacattaggctagggtgaatgttgaacaagtcccagggactcacctgtctctacctccctagtgctgagactgtgggtctgtgccaccatgatgggcatttttaagttggtgctagggatgagaacttggtaggcaagtgctttagacagggccatccccacagccgtgtccttatgatttctaattaggggattatcagtaacaccaccaccaacatgaccgccggcagccccatcattttcactggaaccaccatccttagtcattgtagctctgactgtgactggagggcgggttctcactcagtgccagaaatagagccaaaaggatctggatccccacagggggcttggcagccacccttaccctttgttacctggaagaatgctggggacagcagttttggaatgcaagcttcagcatagatgacacttggctgcctgttgggggcttggtgatgaagacgggggtggcaaagaggaaaaggaagaatgccaggcccacaaggcctacgatgatgctgtagccccacaggaagctgacgttctgttcaatgaaggccaccaccagcagggacagaacggcacccaagttgatactccaatagaaccagttgaagaagcggcgggtggcatcccgtccaaggtccatcacctgccatccagccagggacaagagtgagggaggacccaggaggtcctctgtacacatacatcccattgggatgcttctgaggtcagcaagtaagcacattcctaatctctgattactaaatatacattcagtaaatattcattagatgaatagtgaacatacttttttttatgtgtatggtgtgcgtatgtgtgcatgcatgtttgtatgtatgtaagcacacgtgttcaggggtgcacatatacatatggaggtttgaggtctgatgtatcagttactcattccaccttatctcaccgcaggatctctcaataaaacccagagtccaccaatatgtctagtctccctaaccaagttattctggggatcccatccatctctgttgtttaagactgaaattacaggcaggttaccaaggccacttggcattctgtgtgggttcagggaacccaaactctggacttcatgtttgcacagtaagcaagttaattgctgagcaatctccagtccatgcatatacccttttttgagagccggttaatgactgaaacacttttacccagctgtcttatatgctcatgacgcacattgtttgtttgtttgtttgtttgtttattgtcaccaactaggacatgcaacaaatgtctttaaggccattttgttcacttctggtctttgaacaacccatgctgtgcgttactttcataatcggcaaaatgtccataaaaatctccgttcattccacactattaatgcgatgtatgtctactactgaaaggttagactgagactggttaagaattttctctgaagctcaagttgcaagctgagttttgcatgggagcttacccctttgggtgtgctatcttcccccttctacgcatggtcaaacaaagctggagaaacaggaggtgggtagaggtggttctagctgcctcgccctcacagcaagctctgaccttatgaaaaaaacctttctcaggccccttagcaagggcatatctcaccccaggatttaggtcaatctacagtagatcctccgctctgtcctgctgtctctgactagctgccttggcttcattcccattcccagaccatgcccgctagattctgattcagcagttcagaaggaagaccctggctcctgcatttctaaaaagccagaagaactaggggttgcttcacaaatgagtctctgcattcttgtttgtgtacatgtgtgtacatgtgcatgtgtgcatatgtgtgcagacacactgaggtttatctgcatgtgtgtgcactggggtgagagcactggggtgagaggcatgtgtgttcacactgtgctttttaaaaaaattatttatttttatgtgaattggtgttttgcttatacatatgtctgtgtgagggtgttggatcccctgcaactgagttacagacagttgtgagctgccatgagggtgctgggaattgaacccaagtcctctggaagagtagccagtgctttttacctctgggacatttctctaggcctgcactgctttttataaggttgttgggatttcacctcagttcctcatgcttttgtagcatgtactgcaccctttaatcccctacttccatgtgaagatccaagttagggcctcaaacatgctacacaagtgctccaccattgaaatatagctccagctctctttctctctctctctctctctctctctctctctctctctctctctctctctcttctgtctgtctgtctgtctctctcttttatttttgaaacagattctcattaagttgtggagactaactttgaacttattctgtagcttaagcagaacttgccatcctccttcctaagccttccaagcagctgggattcctgtggtaccaggtctggctaacagccatgtcccaacaaccaccaaatcttaggatctatcactattcttccacccattccaaatcatggaatacatatttccacttactaagaggattctcccacgctttccttgcagctgttgtgctgaggaaatgataaatgtttttctccttatctaaatgtaaaattataatccatacagatgtgtttaaaactgcattgccttggggattctcccttggagaagagagtaggggcactgccatgtcagcttactgagaatccttgcctgaaccttcaagcagaaaattgaatacgccccattatgaacagctacttccatttattaattggaagtacatatgacaagtgtaactggaagggaccgaccatgcagcccatgtgggatataaatgaatccttccagaataagtgaatgccatgtggagaatgatggatggcccttcctgaaatcagcaagtgtgctaaacttgcagcttctatacatggctattttccagatggtgccaaactccccatatccctagactggctacctaacctcctgaatgctgcagcatcctgtccagtgctctggtacatctaatcctgtggccccacccatatctccaatgcagtagagccaattttttttgttttgttttggtttggttttggttttcaagacagggtttctcagtgtaggtctggctatactggaactcactctgcctcctgcgcacagggattaaaggcgtgcaccaccaccatttagccagtagagccatctttaaagaattcaaatacaataaagtctaccttgtcttaagccaatccagtgtctctacactgtcctggggagcgagttacaaagacagcaaaaattacaaggatgtgggaatggaaaggaggagggagcccctcaacccagagtctgcttggaagccaatcaccagctgagaatcaagaattccagcacaatgagcatttgttgtgatggttgccagcatagaaacagtattcatctgatacatagtgattttatgttaaaataatgacgagtaaagctgtagatgtcacagaaggctccgtgatctagcctctgggcaaccagttctgctgccagaaggagagaagaggtgcttggtggctgaggaccttggagatatggttgaaaggtcattgatgagagaccaaaaaagaaagatggcctcctttagggaattttcacaagcttggtccaggaatcctaaagtgtcagtggcagaattctctgagctgacagagctgttttgtgacctgagctttgatcagagctgaattttgatcaacaggaactgcccagatttgcatggctctcatttgcacaactgtacgttctatacaaagcagcttgtgctaaccttccagaactgtacactacaaatctggactgccttcctccatgggggcacaaatcacatgccaggaaatgcccataaagagactcattccaaccaaatggagcctcacatgttattaccctgtgctgtaggtggcatacgatctgctccccggcctgctgttctttgtagcacactcattatcaataaactcctctttgtattctgttttgtagaataaacttgctgtctgccagtccctgcaatagttggccacccctatctactccagggttttagggcagctgggagcgggtaaagagtgggatgtcaaccaaagagtaaagtaagtagaagatgggacattccttttggcaagtatgggaatctcctgatcaacactaagtgggagggaagagacagatgcctgaggcccaagctgcctacaaatgcctgtgtctccatctcctaggggtccaaacacactctgctgatctctactaagcagctgctcacacatgtgcatgtatatttccaaacacacacacacacacacacacacacacacacacacacacacacacataaacaaatacatgttattagaaagggcagtcctcagtaaggaccctggtcactgtgaggcgtgggattgtggatgtcaactgaaagacctaactcattgaaaactgtctgacttccgagtgcttcatgaggaaaataaagtgaattagagaaaatgtgcaattcatccagtggcctgatcatactgccaatatcacctgacccctgcttccacagacacctcatctttgccatgcctgcctgtgatgatttctgcattctgcctgtgatcattcaccctgttcgtagttgttttaataatattctccactagtttattgtattatcaactatactatttgtgcacagctaccaaaacagggccatgtcagcaagactttaagacaaacatttagcaaatatttattggctttgttttccctatatgccacatcatgtcctaggggaatgtcaagggctcaggtgaggtgaatacctggctgcccctctaatgacgggcaaagataagatctgaatatgtttgtccagtacctctgatgttgcttggtgagaagaggctggctggctcctgtacaagtcctcgggtcccactgatatattaggacagggcccaaactggaacctgaggctcagctgcctccccagccttcatgcttgtgatctgttgctttttttggtttttcaagacagggtttctctgtgtagctttggagcctatcctggcactggctctggagaccaggctggcctcgaactcacagagattccgcctgcctctgcctcccaagtgctgggattaaaagcgtgcgccaccaaccccgaaacaacctgatgaatagttaagaaggccaagttaaaacacagatagcaactaggtatggtgcttcacatctgaaatcccagcaaacagtaaggagtccaagtcaagaggataggcacaagtttgatgccaacctgggttatttaatgaattctagaccagtctgggctacaaaggtgagaccctgtctcaaaataacacacacacacacacacacatacacacacacacacacacacacacacacacacacacacacacacaccactggggcaggcatggtggcacaccagcatttgggaggtagatgcagtaggttcaactacaaccacaaatccagttggagacagtctgaaatgctgagaccctgtcttaaaaaaaaaaaaaaaaaaaaaaaaggcactcagcctgaaacttggggcatggcttagagacaggagctatgtctaatcttactgaagattgtatgactctttggagagcaagcagccctactgttttcaaataaggaaactggtgtaaagagggtgagtggtttgtctgaggtcactctggaggctagaacctccaactcaggatctccagtccccttgtgcctcagtggcacaatgcctctggccactcacctggtcagctccgaatgaagtgaggttgctcctcacggagctggcagccagtgccaggagcagcagcaccaagtagagggtagttgcgcagtaggggctggaccaggagcttgggcagtctgcggatgggcaggccggttccagcggaaacaagggtatctctccacagaaggatttgcggccatcgtcggtgatggtggcgagcaacaagcccgaggtagccaggtagagtaccaggctgagcgagatggtgagaaagcggcccaggtacacatctgccagccagcctcccacaggagccagcaggtaggaggcgcccaggaagatgagtgtggcccttgacgcctgcccgccctcccaattgaagttcaagctgttgaggtagagcacaaggttggaggtgatgccaaagaaggcagcacgttccagcatctccaccagcagcaccgcagcagccgctgtccttctccaccgtcgtcggggaccccgtgggcgagctaccagcggttgcctctccccagacccccttggctgctcctgagcacaaggcgcagcagacatcgtgggcctcctgcctccgtgacacagatcctctcctctgcccttccctcttctaccctaaaccgactgccctctttcctcaccccttgcctcctctctttccctcaggtcgctcttcgctacccagattcgatctccactttaaatctccattctctccttctacttcttacttcttgttcatctccaccccagtgattctgcccagtcttctttcctaccttcactctggccttgactatccccacaccctgtcacccgctggctccacttctctgacctccccctctttcctgctagtcaggccctgacacacgccccctcccgccttttctcaactcttgtccccctctcttatggcacctgcgcttcaatgcacacccccacccctgccacctcctccacacacccctctttgcttgactgcctctctgcctccccccacaccagtctcttctggcttttcctcccctcccggctcagactgtgcgcctctctctgcttcttaagaaactctgggcttcccctttcactggtcctgtggctgcctacgtcacccagtctttaggagaaatgaaagcctgtgggtcacagggtcccttctcacccagctttctaaaagtttcccttctcccggactgttgctggccaccctccctagtccaagtctgccagggccgggaagggagacttgctttcagtttcactccacccccctcccccatcccacttgcatagcatcctcttgcaccagactttgattgtcactgtagttaggactgtgagcccgaagagctgtgaaggtcatatggagcacttggtggctgcggtgtcctttcacagacccagagactgcccagcaggggtggggaagggaggtaggagccccggggtccccactgcctgtgccaagggaagtgctcacatgcactctgcattgcaaaagcagcccaggggaaggaagtggccccatatgggaggcacaagattgatggggcactgacctcagactcaaatcaccgtcaccctcttactcagactcctctggtgtcatgtaggagaataaagaaaagccagccgcacactgacctacaaactttagagggatctcatctcaacccactgtgtggtgggctggcctctctcttcttctcccaggctaagccactcggctggcttggtgccttactttgctgtcaactgtccacataagctcttgctccagccctttgtgtggctacttcctctttatttaggtgtctgtagaaaactctctctcaggggtcttcccagatagtgtgaggttagcagctgcctaactggattttcaccatcatactcagcaggtcacacagttccagctcgggcacggctttggtttagttactgttttgttctctgccccactcacttgtgaggcaggcatctttgagaaccttttgccattcattctgagtacttctcagtgcttagcaatgcagctgtatattaagtattggttgaataaatgaattcgaataagagcagcttaagcagcatttgcaagaacaaaatcaagaagctaaaagctaaactaaacagccttgccaaaatcagaaccactataaaatgcatgggccttaaattttcatgtatgtgtgtaattttgctttattattttgtttgcttgtaatttgtgtatgtatctatatatattatttttatttttattttatgtatactggtgttttgtctgcatgtatgtttgtgtgagggtgtcagatcctttgggactagaaatacagacagttgtgtactgtcctgtggatgctgggaattgaacctaggttcaaaacccattagcttgttttttgaggcaaggtctcatgtgggctaggttggcccataactcactatgtagccaaggataaaatgaccttgaacttctgttcttgcttctacctccagagtgctgggattgtaggcatgtgccaccatagccagtatggtgactaaaccctgggctttgggcatgctaggttagcactctacaaattgagctacagccccatcctgtttctcttttcttttctttctttcttttttttttttttttcgagacagggtttctctgtgtagctttagagcctatcctggcactcactctatagaccaggctggcctcgaaatcccagagatctgcctgcctctgcttcccgagtgctgggattaaaggtgggcgccaccaacgcccagtcatttgtttgtttttaaagatgtatttatttttaccttatgtgtatggatgttttacctgcatgtacaatgcatgtatgtatgtttatgtgcatatatatacatatatatacatatatatatatatatatatatatatatatatatatatatatatatcatgagtaccttattctctcacaggtctgaagagggtgtcagatccactagagctggagttacagagagttgtgagctaccatgtaggttttaggaacccaacttgggttctctgggaaagtggccagtgctgttaaactctaagccatttctccagcctttcagtccagtttttaacatttttttttaatcagggaagaagtgcagttgtgatagagaaggagagtccatggaaacacaaggctcagggtttggtggtcagaaaggggtggagttgcaccctgattttgcttttcactgtagggagggataatacactttggttaagacaggtagagacaaggctgggagtgatggtacataccatcaaccccagcacttaggaggcaggtagatttctatgtgttcaaggccaacctgacctacatagcaagttccaaacccgctggaactacatagtgagacatagtctcaaattaaattaaataggcagagacggggacagaaaaggctgttcccaacaagctacttctgttgtggaatattcctttacactgtgtgaagatgtgccactgtgttttaagaaaagctaaatggccaatagctaggaagggggtatatcagggacttctggacactgggaagaaaaaaaggtgggttggccagctagatgcaaagagagaacaagacatgcaggaggggagggaaaagccacgagtcacgtgacaacacatagatgaatagaaatgcattaatttaagttataagagctagtgggacaagcctaagctataggctgagctttcataattaataataagtctttgtgctgttttttttttgtgagctagtagtcccccccaatccatcaacacacctctgttgtataagattacttgaagatgtgatatatttgtttatgctgtggtatgtttgtttaatgatgcaaagatgtattgcatttttttttttttttttttgagacaggatttctctgtgtagccgggtctgtcctggaactcacactttagaccaggctgacctcaaacttacaaagatccacctgcctctgcctccccagtgctgggattaaaggtgtgtgccaccactgcctggctgtgttgcattcttttatgttgcatttggttaactctgtgaagctgtgttactttgtctgtttaaaatacctgattggtctaataaagagctgaacagccaatagcaaggcaggaaaaaggataggcgggcctgccagtcggagaaaataaatagaaagagtcaaagagaagagggcgtatgaaaaggaggaggaagcattcaaggggccagcctctcagtcagacatggaataagaaggaaagaaaagatgaacagagatggaaaaaaggtaaaagttcagaggcaaaaggtagatgggataatttaagttaagaaaagctggctagatgtaagccaaactaaggttgggcaagtaagagaatgcagtcatttactttgttggcacagagcaagcttcagaaactcccttcccaccactaggcgagccagatgcctctaacccagtggaacaaagtagacagctctgagcctaccagccagaactcaagcagagctttttcatgggacagcaatgaatcaccggttacatcagccttccatcacagtgacaaaacacctgaggtctggaaatttttaaggagaaaaagtttagtcagagggtttagtctataaccccttggcccagcttcttggggcctgtagtgagttgggacggcatggctgggagcttgctgaggagtgtggcagctgggaatcaaagagtgaaacaggaagggcctactgtctcaatttccccttcatgggcatccaagtttctaattccactaggcctcacttcctgaaggtactgtcaccgttgagaagctccgcacaagtaccaagtgttggacacatgggcttttggggagaatcttcaagctatatactggccatagtgatcatgattttttttaataatttttttttttttttttttttagataaggtttctctgtgtaacagtcctggctgtcctggaactcactatcatgctagtgcttgtgggatttgtagttacagctggttgtgaatcacttgacttggtgctgggaactgaatccaggtcctctggaagagtaacgcctgctcctaaccactgagccatttctccagctcccgagttactttttattatatcctgttgttaagcttataggaaactggtgctgagcctagcctcagtttgagatatccccagggatcccatccacaagtctcactgatagctctcagcagatgtcttctccccgcccccaccttgcagcatttaccatgttcaggaagcaggtgcttccagccttgacctctgtgcagtcggggacttctctacaatggcagaccctctgcagcagcaggcccttctgcaatagcagttccggctgtcattggacctttccactcatgatcagcactgaggtcctggtgaaactgtccaggttcctgctgggctttcggactagttaagaactgttgtccggccctggtgatagcctcctgagcccacccagagcttcatctctcgctctgctcgtctatatttcccggctcattctgccctctgctcagcttccagctccatctcatctgcatctggacccatacattcctcaagcctagaactttccatgactcattactattggtccctcagcacttgacccagtactcaccttttctgatgagttttccctaatttctctagggaggttgggttacccctcggagctctcattatgattcatgtaatactatctgttcaccggtctatctctccaggggattagagactttggggaacaggggttattattattattttttctttctttctgtgcttcagcacctggcgacatgcccaacacatggtagtcacatcctctccaagaaaacaaacactggagttgaccaatttgaagacaggcacagtaataaccctgaaggtcaatccctaaagtttcttatctgaaaactacaagagaaccacagtcgccttagaattcattgtcagcatcgaaatgagataaactagaactgtggctggcatgtaatagccagtaccgtgtaatggccaataaatgtctgtcttagttaaggtttctattgctgtgaagagacaccatgaccacagcaactttcataaaggaaaacattgatttgtgatggcagcttaccattcagaagtttagtccattatcgtgatggtgagacgtggaggcgtgtaggcagatgtggtgctagagaagaagctgagagttcttacatctagattcacaggcaacaggaagtggtctgtctcactgcacatggcttgagcatatataagacctcaaagcccacctccacagtgcacacttccttcaacaatgccacatctaatccaacaaggccacacctcctaatagtgtcacttcctttgggaccattttccttcaaaccactataatgtctatactttgatcagtgtgatgattacctgtgtcaatttgactcagtctagactcacctgggaagacatctccatgaaggagtgaccacaacgggttggcaatctcaactatatatatatatatatatatatatatatatatatatatatatatagcattatatataatgtggtatattatacacagtactgtgtataacatatatattacacattatattatatactataatatatgattatataatataataaataatatcatataatatgatgcacaacactctgaccaaaagtagcttagcaggggaaaagatttgtttcagcttacaagtcacagttcattaatgaaagaggtcagggcaaacaggaagaacactgtttgctggctctctcagacacccatgcttaagtacctacctttttttctttctttataaataaaaatcactttactgtaataaaatcataaataaaaaaaacaccacacagctagattaaagtagtctattaaacaaatgcttgcctagtctcaaactctatacatctcaatgaacttctgttcagctagaatggctgtttggaagatgtggaaacttagggtttcacactttctctatcaattacatttttatgcactgatcaactacataaaatactattgatctccacctacagaataatgaaattagagtcaaatctttcatcttatataagactcagttggaaatggatcaaagatattaatttaaatccccaaatgctcacacttctagatgaaaacatagggaatattcttagtgacactggggtaggcaagaactttctgagcagaacatcaatagcacaggaacttgcctgaagtgccaacagatgggatgacacgaagttaaaagtctctctgaacagcaaaggaaaccatcagcagagcaaacagtcagcccaagaaatgggagaaactctttaccaactacacttcagtcaaaggactgatatctggaatttacgaagaactgcagaaattaaatgccaagaagatattaataatcaccatcatcaatcatcgaatgaatgaatgagatgaacagttttcaaaagaagaaacataagtagccaataactgtttctggaagtgtccaacatccctgatcatcagataaatgcaaatttaaactactttgaaatcctacctccacccagtcagaatggctgtaatcaaaaaatctaacagcaaatgctggagaggatgtgtgtgtggtggggggcggggcaggggagaaaccttatcgactgctggtgagagtgcaaattaatgcggccattgtggaaatcagtttggacattcctcaaaaaaaaaaaaattcagaatagaacgaccacaggacccagctattgcactcctgagcattcacaccgagatctccgtaacctgccacggagatattcacaaacccatatttattgcagctctatttctaataggcaggaatggaaccaacctagatatctaccaacagatcaatgaataatgaaaatgctatatatataaaatggaaagttattcaattaaaggaaatgaagtcatgaaactttcaagaaaatgagtggacttagaaagtatactattaaatgaggtcaccttaactcagaaaaaaaaaacccatatgttctctctcatatttggatcttagcattatatatatatatatatatatatatatatatatacattgtgtgtgtgtatgtgtgtatctgtgagtatgaatatttcataacagttagaaaggagatcaagaaaggttaacattagatcatgaggaaagacaggatataggcaaaaggacaaagaagtcatggaagaggatataaacatatctttctcatatagcccaggtgaccaccttcccagggaatggtgctatccacagtgggctggaccctcccacatcaattcacaatcaagacaactccctacagacatagggagacaatctgatccaggcaatttgttagctgagaatcccttctcaggagaccctaggctgtgtcaaacaaacatgtaaagctgactaggacagtccccttcaatgcacactccctatgaccagaagtttcttttattgttaatgatgacaaaatacacgacaaaagcaacttaatgggggtgttggttggttagtggtttgagggtacagtctgccatgatagggaagacagggtgacaggaaagtggcagctggttactttgtgtctattatcaagaagcatagagagatggatgctggtgctcacctcctgttctcctttttattcagttccaaacactagcctgtggaagagtggagtccacattcagatgggccttttctgctcagttaaatctctctggaaacaccctcctggccacacccagaggtgtgtctcctaggtgattctaaattcagctaaactgacagagattaatcatcacagtcttccacaaggctctacctatttaatttccactaccttccaacagtgccctgagccagttagatactgggggacattaagaaccaaacagcaaacagcacagacatatgttgtgaccatttataaagtgtcttcaggcacagtgttccctgaggcaaaagtcatccttgtggacaactgatagagtaaataaatatctgctgaatggtgcctaaagatttctgttgtttgaagtcatcaagtctgtggtcatttgttatggaaacctagggaatggctgcagaagggctgggcatcactgagtgtgccttcaccattaaaagttgtgatctaaggttcaaatgcacagaggggacgttatggggatgcagattgtcagtgcaaacaaaacacagctgtcccctcaaagggaacaagagtagtttattatgtctctttttctctctgcgtgtgttacgcatgctgtaggcatgtgtgtgccagtgttcgtgcatgtggaggctcaaggttgatgtagggaatcattttccatggttcttattctttgagacagggtctctctgccaaacccagagctcgccaatatggctaatcttaatagccagcttgctctgagattttatgattctgtctgccaaggctgaaattacaagcaggttgccacaaccacccaacatttaaagtgtgttctgggcattcaaactcagatgctcatatttgcataagtttatttttaagcaaatttagtgaccatggctggggaacatagacttaaggcacctcaaataataagttccagcctggaaacagttccatgaaatttttgcagtcacagagcaaaagaaagtcataaatcaaggcatttcctaagtacactggtggtgacacccccccccccagtttcccagagctcactgtattatggctccgaggctttgattatcacagagtcacaaatggggcatcagctccaccccaggctgttcatgctctgtgaggagtgctggatccagcagctgcacaagtcaaaagatcagtgatgagtaatagaggggtcagggagccttgggatcctatggaggagagcactgaccctaggatgtgctgaaaatgggacctgcatgcctctggctattctgtgaaggaactaggttttatgagatgccagatttcacctttctcaattctaaggatccctgagccttctgcaggagctcatgtagtcaaatttatttttgtagtcatgttaaagcataggttgcttttcttttttccactggcatagtttgtctggatcataagcaacagtggtttaagctgccagggctctggcagactcaaaaaatccctgtagtcattggattacaccctcctatacagagtgaggaaataggagtgacagctggttttatttaatgtcctcagtgaaattgttagcactgttcatatcatgaactcacatcccagggcctggagagatgcctcagtgggtaaaatgctagcaatgcaaacatgagaacctgattttaaaccttcagaaaccacataaaaagtggggaggtggaacaggattcccaggctagtcaggtgagcaaaattggtgaactctgggtttagtgagagaccctgtctagaaaaataaggtggcaagtgactgaggaagacaactgaggttgatactcatttttaaaactcccccctccacacatacggggggggagagggagagggaggaaggggggagagggacagacatgttcacacacacacacacacacacatatacatcacacacacagaataaccacaggccatggtcatacatacatttttttaggactatgtgtaacaaaatgggaacaagattgtcctagttggagttacaactgctgtgatgaagcactatgaacaaaagctacttggggcgggaaggatttatttggcttacatattcagaatcagagtccgttgagggaagccaaggaaagaactcagatcaggcaggaatctgaatgcaggagccgatgcagaggccatggaagggtgctgcttactggcttgctcaacctccttacaatacccagtacactagcccagggatgacaccacccgtaattgactgggttttcccaattcactaattaagaaaatgccctacaggcctgcctacagcctggtcttatagaggcaatttaccagttgaggtttccttccctcagatgactgtagcttcatcaagctgacataaaagcagccagcatggaaaagctgagtgttcgtcatggagcttggagcgcctcattaagaaaagtgaccatggagaacaacgaaaactcagtggattccaaatccattaaaaattttgaagtaaagaccatacatggaagcaaatcaatgaactctggaatatatctggacagtagttgcgaaatggattatcttgaaatgggtgtgcgcatgataattaaaaagaagaactttcataaaagcactgtaatgacaccttgctctggtactgaagttgatgcagccagcttcagggacacattcgtgggcctgaaatatgaagtcaggaataagaatgatcttactcatgaagaaattgcggaattgatgaataaagtttctaaagatgatcacagcagaaggagcagtttcgtttgtgtgattctaagtcatggtgatgaaggcataatttttggaacaaatgggcctgttgacctgaaaaaactaactagttacttcagaggggactattgccaaagtctaaccgaaaagcccaaactcttcgtcattcaggcctgccatggtacggaggtggactgtggcattgagacagacagtggaactgatgatgacatggcatgccagaaaacaccagtggaagtcaacttcctgtgttgacttcctgtgttctcctgaggagaaaatgacttccacaaattatcttctgagttgcacatgggctgtggcacacagacaaccatactcacaaaagaagttacaactcctggagaaattcaaaggatggtcctggctcatccagtcaccgtgagccatgctggaactatgcacacaagcttgaggttatgcaattcttactccagttaaccagaaggtagcgacagaatttgagtccttctcccttgactccacctttcaggcaaagaaacagattccatgtattgtgtccatgctcacaaaaagaactgtacttttatcactaaggaaatgattgagggctttgtttctgtttgttctttggtttgaatgggaatgacgaaacagtgtcagggagactttatttccctctcatttaaatcaaatctgatgtttcagatggtattgagaaccattccaccgccctagaaatgcaaccacaatgcagctacctcaagttcaacaccaggtagttgaaataaaatttaattaggaacaaataaatttcaatgatggtactaccattatagaggaaattataaagttactctctttataattatcaagatttggtgatactacaaattttgaagtaattaagaagaagttaaactttgaggtgtaattttatactccctacacacatcaagaatgtcattctagcttttggtaagttatagaattgatagtgtcaaacgatacgtcttagaacttgaatccatgggcagagtcaaaggcttgaaactttatttggaaatgaagtatggaaataaagtgttggaccaccagtaacattcattgtagttactggttttgtgatgttggccctaagcatatatttgttactaaaaaaaaaaaaaatcatgtttattattgaaaaaaacctaagtatttatgtgagaggaaaacatgagtgaaattttgaaaactctttgaaagctaccatacatcagtagtggacatgatggcgaggtgctaaatctaccagaatttgtttcttacttgttcttatacaaacagcttggttttacagaccagcaacatatataaaggattgttatgtaacagcctcaaattgttgattattagaatgaaataaagaagttctgcgggaacatactaaaataccagctgtaaaatagaatgtaaggaggggagaaatgaatctactgtaactggaaaaagatggtttgagccagagcagagctgtggcagagccatgggcacagcttcagaaaggactcccagctggacccacctcatgagtcctcgtttgtgtggatgaagtccccaaggtccaagtcaccatgtgagaaagtgagttagatcagaaacttctgagaaagggctttcccaaagtggtgggagtctccagaaaatccccgaactccatgtccagagtctgtaagcatgctgactttctgttgaagtctgcaataaaaggaagccaatggtgatatttgcattgccaccagagagtaaaggactgtggcacacaggacttggggaatatccagtcacaggccctgcagcccacatgggaagctgcaggatggagtccagccccatcagaagctgtgctccaggattcctcacttgtggaggtgctgagccaatgctgatgtgtccagcacttcacagaagcttcctttttgctcaaaggaaggaaggaactcacatatataactcataggttcttgtttagactgcatctattcactaaataaatgtagtatgtgatggtattttaaagtgtgttcccatgtgtcaattttataaaagtttgttgcatttttatttcaaaacataaattcagatttaaaataaaaaaaaatagtagccagcctgcaggtgccgagtgcttcttgtgctgtagcatacatatctaggctgcgtctaggaaagcccccgcattagccgttctaggccttgccatctgaactggctgggcttgtttttctttttaaaagaatgccgtatttggggtctgaagacattaagagtgttaggagtgcttattgctcttaggaagtttgaagttagttcccagcacccagggcaggtggctcatgacctctgtaactctagctagctccaggggatccaaagccttcttcgtgtctccaaaggcacctgcacccatgcatgtgttcatgtgttctctctgtctctgtctctctctctctctttctctctctctctctcacacacaaataataaaataaaataaatagtcaagaaaagaatactatatttacttggacccataattgttcagactgaagaaactatcaggcagtgttttgaaagtgaagaaagcaagcctgtcatgtcaaggtaaacaattagtgatatagttgttgctactgatgaaactggaggttttaggtgaaatttttgaattttagcaaactctgctaccatgacagagacagcttcccagagactgaagtttctggatggggtcaaagattcggtgacttgatttcctggtattgtgtaataaagtgcattgatatttgaaagaggtaaataattctgtgaaccaatctgtcccagacggcccacaaatgttagcacaaaaccacaagtggaagatggggtggggggcatggaacgccgataactcgcttaggagtggtagcatccaacctttcctgatgcacacagaagtggacttgtgtgcgctttctcttccttctgcttagacactcttcccttggtcactttgcagggccaaggtcagtggagagatagtgaaaggctcctggattcctcaagcacagagagcctctgatgtcccttgcaaattgagatccaaaggtcttggtttcaagagttataaataaatgtgacctcactgatctgagcatccagctggacacatcttcccgattcctaccctgggcttaacgcccacgaagcatgagcagtttagaatgtatcatgcccttctagccacagcaacgcttgcctcctgctgtcccgccttgaggtacccagtgccccatgccaggagcacccttcccccctaccctgtacctacctctgcctctgaaaccgatctctcctctctattccgtttttggttggttggttggttggcttgtttcttttgtcttttgtctttcctgctttcattaggatttagagaagaatccctttccattctagttttggatccactaatttattttttaaagtgtgtgtccgtctgcgtacctgcctgtgttcatgaatatacggaggtcagaggtcagaggtcagagggaaacttgcagaagtcagttttctcctaccctgtgatgagtcccagggactgaacgcaggcttggcagcaagcgcctttactcactgagccgtctcacacttactgtgaattgcatgcttcttgaaggcagggaagttgcttcatctcttctcttcccgtcgcacactgacgatgagtggagtggaatctggaagccagacaaagccgcatattcccacgggccccttgtgctgccagagacctccactagagggtgtccttagctgttgccacaacccgttccggtccctctctccctctgggctgggcggggtctcactgtgggaggggcctggttcaccatggcttcccaatgagccccatcaaatgatccctcagatgttgggacactcctgctggagggagaactcctctccaatacacaagtggagaaaacaagctagaatggagggggtggagagccagaaaatgtcatccgtatggtgcaaggctggaactgggaaccagttcctctctagaccccagggttctgcttagagagccaaattatccattccctcgttctttcaacaaaatttatttagcaactactgtgttccaaggggagcacattggtgagctaaacacacacagtcccagcctcctccctagcacaattcagtgtctcccagacaacctggtcctctccagaccagctctttcttccccgaatcttttctttacccagcagcctctccccatgaccacctgctgaaaacccactcaccatcttgcccaactcttatgacatgaacagctagccctcaaaggtggggttcagatcctgtaccatctccccactctgagatggggcacatggaggtggggctgtcctgctctaagatcatcttctttttgtggtttcctttggaaaggcttaggtcctttcctctacaaagtgcatcccaggactggggagatgactcagtagtgtgccatagaagcaccagagccagaactcagatcttcagaacctttgtaaaaggcccacaggtatggcagaacaacctcctataatcccaggactcgagaagcagcaattgggcctccaggataaactggctaactggactaatggaattgtgagctctgtattcatcgagagacccaacttcaataagtaaaatggaaaactactgaagaagactcccagcattagcttcaagccaaaacacacacacacacacacacacacacacacacacacacacccgagacacatcacacacacacatagacacacacatagacacacctgagacatatcatacacacacctgagacacatcacacaaacacacacacacacacacctgagacatatcacacacacacacacacacatacacacacctgagacacatctcacacacacacacactcatgcacatatacctgagacacatcacacacacacacacacacacgcacacacgcacacacgcacgcacgcacgcacgcacgcacgcacgcacgcacatatatctgagacatatcacacacacatacacacacacaggcacgcacgcacgcacgcacgcacgcacgcatgcacgcatgcacgcgcgcagaagaaaagtgcattaagaccctatcctcttgcctcttgctcaaacatgccccgcacaaaccttggaacttaacctcatcagagctggattctgtgggcggggcaacaggggccatgaattcacacatctagcaccctttgctagacatatctggaatgagctgtctcttgtctcaagggaacaaggcacagcctcttggtctttcttgaaagacccccagggtgtgcacatcgggcatgtgactctgtgactctcttggggttcacttgggttggtgggtttatgataggcagcttgggctcccctgccccacctcctgtaacaacagcctggcttcctggagaccaaaaccacaagcagaaagtagaggtgtgagatactcacaggctgggcctgtgtgtaggagagagagtaggagagagagtgtgtatgcagcatagaggacaccgagaacagaaagggcaacacgggtgaggaagcgagacggctgccgcccgcaccaggatggcacttcctacaggcaggcgtgtgtagcagtcggatatggcaccggacatgtggctcttctttgggatcgcgggattgctggcagcagcgctctcaggtagatctcttctgtcacctcctaccacttattccagaggacctgggtcctgtctgcttggcaccttgctagctgtttccttgtggccacctttgtagagccttttaagctaaaaccatgctggtgtgacaacagcttgggggcttgagataacacagggaccccttaagggaccggaactggcaggatggtgctctcaccctaagaggcctcctgggagtgagatgaatgatccctgtgtctgactagggtcctaggtctaagtagggaagcacacggcccacccataggctcaagaagcaccccctcccgcatatgccttcttaccatctcacaggaaggaaggaaccactcctttgtgaagcaggaccaactgacaacattactttccatgttaagctccagggtagggttcacccagaccagaggtgaaacccagggagacccgggggacttctagtctgtcattcttggtgacttcagctcatcttcttggattaatttgagacataaatgatcaggagggctcttgaggtccggagctaccctcaaagtgctgaggtatcctgcctcctgggccagaattctagagcaaaggcctggggtcaccagacacttgtgagatgctgtagagtgcggaggccaagatagctggaacaggcaacagcccagagactcgggagtccctgtgcatgctggactttacattttgggggagaaagatggtatagaaacagacttatggcctgaggagttaggtctgccctacagcaggagagcacaggcagaggggcagggatatcaggctggctcagaggctgtgatgtctaaaggacttggggatgtctaaaggactgtcttctctctgtctggatccacaggcatgttctccaagctccctggtgtcagactggtttagggaaagttattttgctctggtagtaggaacttcgtatcttggctgtcctttctggaccagctgtttccaaagcactttctctaggggttcagttgccttctgcccaagctgactgaaactggcgagaagtctcccgcttcttcctgtccaccaggccttcctaggaggcctggcacaggctcataattaagtcctaaagggaaaggactgctgaccacccagaccgaggcttcaaacaaaccagctccttctacttccactgcctcccagtaggactgagggctggagctgagccagatacaggagccctttgtgctgaggctgatgggtgtctggtccttggtctgagaagatgggtgcagggtgatgcccatgggaaggcaagacctcagcagcaggcaggctccttaggtatgtgttgtgttacacctgccccatgaccgtgtcagtaccctcggcgccttcctgtccctgtgtcaatgtcggttgactcatttttttgtttgtttgttactgataaaagtttagttaaaaaaagaaacaaaaagcctttgctatgctgtaagtggaaaacccttatcattcaccagaaattaaagagaaagggaaacataaatgaaaataaatggtggcaaaaaccaatctgtggcaattgaaatgatgccatccaagaccgtggagccttaggcctacacccaccctccctcttagttaaaggggtgatgagggagggagtaaggaagtcggttattttcttctgaacttgtccagcactctgagcagggaaaatagttcccactctgggcaatgctcactcatcagtcactgatggtctatgtcccactgagaaatctcccgagaggatgagctttgcaggtgtaaggaaaactgtaccccaaagtgtcccccatgtctttctcctcctgctaatgttagggaggctgagcgcaggacccgagtgtcccttccctctgcatgacctggtaggccctgctggctaggcacaggaatgcttataggggtggtggatctgtgggggcccacacatgcttggggaaagaacattaagagaaaagagaaagaaaaggtagaaaacgatgaacaacaataataaagggaacgggacagttaagtttggtgaagctctggagctctctgcccaggagtggggtccacacctgagtggtccaagcctcgcttggttctattctgagggtcaggggttggcaaatgccaggggttggtggatgctgtctttcttgagagctgcaggactcttcctaggcctggtacctagctccagctggctcctggcaaggcccgaatgttactgggtgaccacaacttagagacacagaccctctggttcacgatcgtgctcccagttacccgggccgagttccatgcctcagtgtcctgatcatccaagggagaaagagactgagatagtgaactagaagccccgactatagagaagacggggttatgaaactggagttttacttactattgcttctgattcaccaagggcctgagctccaatcctgccctggtcctcactttcctggttaatggataaaatcttttacgtcctgaaaaggcagtttgtaattattttaaaataacagtacctcgggctagagatgctagtcagtcagtggctgagcatttttctagagtgtgcaagatgcccgctttgcactcagcaccacacatacagaaatggtttaatttttaaaaattaatctatctttccttacttacaactataaattatgttttatttgtaagtttgatcatttcaagggtccttagagcctatcagtctgacgagagcaactttttaaaataataaatgccccttactaattaattccctcagctctatgctatccaacatggtggccactgtgttatttccatttgagatgtgtcagtgcaaagcacaaaacaaactctgaaaatgagttaaaattacatatatatatatatatatatatatatatacatatatatacatacatgtatatatatatatattatatgtacattaatgaatggcacagcacacatggaagtcagagaacaactcttaggaatttgttttctctttctaatatgtgggtatctggaatggaactcaggttgtagttggctgcaagcacctttgcccattgcaccatcttgccagcctgtcttattataaactgaaattcggaactgaaggattgaaatattcacactcacccctcactgaccttgcaggttctaggcaaaagggttttgttgtgagtgaaactctcagacccatgaattgcttttcttctacagcagagaacaaagtcttcccaaggaagggtgtttttagaactaagacgctgacataagcaaagtgaccatgatgttctcctaaatattctaatgatattggcagacattataaaatcatcttaaattttgaaattaaactttgaactgaaagcagttgctccatctcgtgctcgagctctgagggccacatgtcctcaaataccacaaatacaggatttttacataccaatgcacagaatttcactttgtgcgcctctagaagtactagaaggttctactcatttgatcaggtatgttttgtaaagtctagtctccctggaagggtgtgctggagactggggcttcctcaagcagagagaatgtgttatgttggtggattcagttgaggttgttttttttttttttgtcattttaccaaaatagaaggtgttgtgatttttctgtgcttccaaagccatgccaggtcctttgtcctccagctgggcagttctttgacccacagtctctgggtactagggaaacaaacctaatcttctgtgtctgtgtcctcacctgagcgactaaaacccatcacatgtccactcgtccttccatgtcatgtcacgtcttcctgcctgcaatacagcttatagatgtaccagtaacacgacaaacttccatatcatctgctttcttgtgctgtctgatcacaggttacaactgatatggacagttggcatggctgttacaacagtggccatcccacgtggcagagctggcacatttaggcagacatagattgtttcagcgtgatctgagagtaccgagacacattgctagaacgagctcccatgctcgttctgggtttgccaaagaccttctttgctgcccacgccagcttcatttccttacaagaaagttcatgataccgccaggccctggccgctagattgtaaggctaaaaagacaaaacaaaacaaaaaaacaaaacaaaacgaaaaaaaaaaaaacccaagcttttcccctgagacaagaaagaataagtagctgttggtgaaatagttcagccaagtctggtgacctgaattaaatccctgggaagcacatggtggaaggagagaacagattcagacaacttgttctctgacctccatgtgtgtaccatggcacatccatacctgtacacaagagaggaaggaaggaaggaaggaaggaaggaaggaaggaaggaaggaaggaaggaaagatggatggatggaaggaaggaaggaaggaaggaaggaaggaaggaaggaaggaaggaaggaaggaaggaagactgagtcagtgagccagtgaacaactctgactgattaggacagggctggtgggtctgatagaagaagaccaggtcactttccccatgcctgaactacacacagaagccacaaattccaatgcttattccaggccagaggtttacattaaggagcctctgtaaactatcattcccaggtcaccaatgtcctccagctctctaacccttaacccttcttaaacaatgttttaaagtggtctcctgtttattccacatggctcacaagcaaagctgttgagaagcacctgagcatgctatcagtaaaaacaaatgtggaaacaaaaagatgtcactagacactagctgccagccatatgctttgctacactctgtcctccaaagggaaggctgagggtgccagagccatttacaactagcctcacaggaggccctctcctccatgacagactgctggaggaacaactcagtggtaacagtgttgaggtggtggccaacaaagccactgtgcaaacttttgggtgtgtacttgcactttggaaataccaatcaaagaaaggtcgtggggggtggggttgggcccatgcccctttgacaagactcaatctgaggaagctgctcggctgcctggaatattctggacataaatgttccatagcaggcagtcccaaggcaccctgagaagcccctgaatttctctggcaagccttgaaatagggatgacaccctaactcatgccccctgacccaattccggcttgtgttcatatggaggccagacagtcagtccctcagcagccatttgtctaccttgttgagaaagcatctttggctggcctggaactcacaaatttgattagagtaattggccagctagctccagggatctgcctgactttctccccaattctgggactacaaacacatgccccgcacttagcttattttgtatgaggcctggggattgagatcgaggcctcaggattgaaatcaggtccttgtgcagactgagctatcctctcccacctcccagtcaaccctgggaaacagattccctatgacctgggaaagatggggagtctttgaaggggtgaagtcaggatgggtttggggaaccagctcttgccttaataaattttgcagggcaatctcaagcaggctccttcttttctctgctattagtttcctccctggaaaatgaacattgggcataaggatggatctaaaatccttgccctctaagtatatcgctggagaccacaggctgagagcagaaagagcagagatccagtagacacacaacctcaggaaagacacagtgcattataaccccagccaggaccctggggtcagacaggcttgtttgcagtcccagttctatgagcccccagggtcgtgtgcctgcaggctacagacagcaatgcctgacttcttagtggtcaaaccaacttagataatgcttccaaagttcttgagcacatgacggtattcaaaattgttatgttagaaatgtgtcacctaaggccaaaaatgattaaccatgtgcatgtgcaaaggatttggtaattaagctggtggcatttgcacaatgaactcatttacccacaagcaattctcttttatagatgcagaaatggaggcttagcaaaatctacagctagtgagtgccggaacctgagcagtccatagccctttcctccataagtaagaggcttgattggcactctgtcaacttgtgaagtttctttcccaaatggtaccgtcttcttgccttcttactattgagtccagggtctgcctggcggagctctggggtcctgtggttccaaaaggcttttagcaatacgggagacacagtgtggctgccttactcaacccatggctacccttcagagagtttgccatggctacccttcagagagtttgcctggcagttaagatgaacatcaggaccaggcagaagagtgaaattcaagaggcaccaggggccaaggggaagcttgcctggcagcaggttccatcttagcacatttattctgtattgagccttgtgttggtattaagaaacaagatacaaaagtcatctcattatgatgaaggtgggcaaacataccaggtcaacctcacctagtgtgaccacagatacaagccaatgaactataagggcctcctgtctctggtgactccattttctaagtctcagcttagatgtttaccttttcctgtcctcacaattctggggcaattccctgccatccccattttagaggttgggaaattgaggctcagaagattgtgtaatttgtctcagtggtggctaatgctaaatttaagaaaaaaaaaatcacatctggaactggggaaaaggttctgcgggtaaagtgcttgccttggaagcatgaaggtttgcatttgatccccaggttagcaaacaaaagcctgccatgtggtatgccattgtaatgccagtgcaggggatccctgcatgctatagtcagccaaccccaccaacacggtacaattcacgtcagtgagagatcctacctccgtgaatgttaaccgtgacacactgagaaaaatactaggtgcgtcgggatgcatcaagggccccataagctgcttcagcagcagatgatgtggctaaggcatgggacagctgaggaggaacaaagcatggcccaggtttccgcctgccattttgtaggtttggtagcctgacagcctcctgcctgaaaatggctcctaacaaaggttggtagccagagtagctgataagctgttgagcaagctatggggctaggcctggcacacctaaaccctgggcatagggtcttcagcatagggaagcaatctcttgcttttctcttcaagagacccagcccctgggtctccacaaatgttcatgatggggctattagaagatccagactccatgtcttcaggccactcctgacctccctcacaatcctggcctggctgattcctccagacactgacaacagatgccccagggggtctatgtgggaccaaaggcatgcaatgggctgttgggggtgggggcaggctgggagaggagaagacagagctgggacctcttctgagcatccacccctcagttaggagtcacctgtcactgtctgggtcaggaggatacaggaggagttgctgtatcttcggaactgggggcagagctgagcaaggacctgccccatttacagaagagcaaactgataccaagagctatgggttcctgacagacctggtcaccagctcacccacactagctgcctcttcctcagtggggttaggagggagggttttatctgcacgataatatgcttttagctggggtgtgtttacctcttcctggaggagcctggggatgacttggggctagggcagaggcaacagtgcactgttgggcagccagttacccagttcttagcccgctcattgttctagccttctttctggacacagagttaagttccttggagaatcttctatctaaatgagattctggacatccaaggatgtctaagctggaggaaacccagagtggtcgcataacagcttctaattgccccagcaggaaagtgaacggcagagtgggaagtgaggtgcccacagtcagggcaagatggcaactttacaggtttcccattcccaccttggtgcctcttctcacattacctgtgagcctggctcatgcttggcgccccacctttatgccagaatagttagggtatacttggtccaacttggtctcacttgaacacaggtgatcttgggctccaacttgctggacagctgggtgaagagaggagctgtcttgtgcagcccctctaccctccctctaccagatgactcgaccctgagttctggcaatgttttatcttcagtttcttccctgcccccctctctccctttttccctccctccctctgtccctctctccctttcttccgtctccctcactctcttcttctctctagtaaattttatcagagccatttaattagaaacttactgagatgtttcatgaataacacaaagagttcccatgagtacttcacccagactcccaaccattaagggcatctcatttgtttttaccattttctcaaaaagcagatattttgttatctgttactcttttcataactacctgagagcaggctgtggacatactactgtctctttccccctaaatattccaatatgtcctagttttgtttcttaggttgcattgctgttttattttgtttttgagagtctcaaaatctgaccatgttgccaggttgggctcaagtaatcctcctgcctcagtttcccaggtagctagaactgcattcatgtaccatcatgcccaacattaggggtttcatttttctgtaagaatttcaggtctgtataaaatgaaatatggtcacatataccctccattccctcctccaattccctttcccccaatacccccctaacttcctgccccccttttataacccgataacttcaattagtgctgctcatctgtgcatgggtgtggggtcatccactgtagtgtggggaagctacggtaaccacatcctaaaagccatcaactgccaacagctcctcagcaagggtttgggcctagagggaacctctcccttctgtataggaattttttctggcttcatcttgagtttctaactacggctgctgtgtatataactgctgtgcatataaaccgagtttataactatggctgtgtgcaatagctgtatctcgttcagtcgacagcatttcacagcactcttcctcatcctctagcccttccatttttttctccttcctcttccaagatatcccctgaactctgtgtgtgtgtgtgtgtgtgtgtgtgtgtgtgttaaaaatgtcccatttaggtgggaaggcattctcttacataatgacagtgcattttccaaaacccaggaaattaacatgaatacaatattattaccctccagacttttctcagacgctgcagttagtccagtaatatccagaagaaaattgtgcttcacgttccgtgtgaggctctcatgtctattctctcccacctagaacgatttaccagctttttctttctctttcatgacatcgctcttgttgaagcacacagaactactgtcccttatctggttagtctggggattgctcctgatggatttgagtcatgcgcccttgggcccggatgccacaggtcaatgtgtatccatctgagtggccctgtctcaggaagcctgtgggatggactgtcccttcactcttggcttaaccgatgacttttcgctgggtttctgttagaactttctccttcttctttgggattaaagcaaatcttgtcagtagaatctttgagaatgtagacataaatattctggtccccctcagacctttgcccacttgttgtaacatggaccacccttgcccaaataagttactataattatgcttgccagtctgtgatctcagaacaccatccttccttctgtatttatcattaccaacttggttttcttatctgcctcagtggctgagatcttgttggcttggtgcatggaaggctggtaggagtgaaacagaggctggaatttgccctcaggggagcctttgatggctgcctaagatgttggagtttggctcagcaactctctgccactgtggggagttctccttcggcttgttgggactctcgtttacgcgttggatacttttttaagccataaaagttacggaagaaagctaaacaaacacattttgaaaattgtatcattccagaaagtaatgcacacaggaaaagagataaagcagcctgggttatagatgcacgtgagagctccaaggacatctgagcagggtcctgggcgatgcccatgtccatggatgatgacatcagggaggaagtcattccaggcaaagggaatagatgtgagaagctatgtgaaagaagatatcacagggatgggagggagaggagccgggccagagaggttagcatgggcacagaacctggggtttggaatcgaccgggggaagagggaaatcagagtttaacatatgatatatttatacatatttaccaaaacactgaaaacaaaggggtcggtaaacagcctgccaccaagcctgagtgggccctcttttacttgaaaaatggtaggtattaaagactggtaatattatgttgagatttttttgccgtgtgcgtgcgtgcgtgcgtgcgtgcgtgtgtgtgtgtgtgtgtgtgtgtgtgtgtgtgtgtgttcacatgtgcatgtgtgctagccaaccacattgtgtgtttggacgtcagagaacaccttgtaggagtcggtcctctccttccaccatgtgggttctggggctcaaactcaggttgtcaggcttggcagcaagcaccttcaccggctgagcctcaggtttttcttaaaggattggacaattgtgtaatttgcttactatgcaatgcgatgctgtttaatcttttaagttgtcttctgaaccaagtctgctgtgggaaagtttcactaactggtgggagcagtagtgggttgaggcaaatgggatgatggggagggggccgggccgtgctgtgaggcatagaaacacagtttacagccagtgctggttgggagccaaggcagtgcctctaactccttcagccagactcctgctggtccaaagcgccctttgataatagagaaaccagagatgtggataggatgggggacttattattacccaagacagccacagttgctggcctctcaccactcccacccaatgctactgaaaattcagaaacaatgtaaacattagtcatccttattgtaaaaaagttgtaacaaccacataaaaaaaagaatgcaaagaggacagaagtctcacccagaaccttcacacagcccactcttggtccttgaagaagggagtttttaattctcagaagcacagaggacgttttggcccatcagcacataggtgggggtgctgagtaggcctgtggagtggctgttaacacacagattctgtgatcttcaaacaacactgaactctatcccttccgctgcaaatttgagaaaatccccaacccctctcaggtaaaatgagtgcagtaggtcaggccctcaacttcagggctgtgacagaccctgtggctccctacaggcttctacagataatatttactcaccagcatctgtgagactggtttggctttagccatatcaacacagtcacaaaactcaggctttagaaggacttgctggcttgtaggcgctacaagtatccctaagtaaaggaggatccgtccctccatcttgctggttcctttcctccctcctagaattcgctagaattctaagctcctcctgccaagctgctgttgaatttctattatagatatgagtgtaaaggtgagtaatttattgtcttggggttaagtggcaaagtcccaaagagtaggtgagaccaataaaagatttattttcacacagccctagaggtttgaattatgtccaagatcatgatgtcagcctctggggttcttgcagagggctttgaggggtatctgaccctatctccttgcttctgtagatttatgtccatcttgggtgttcctttgactcgtagaaacatcactccagggttgggaatgtagctcagttggtagactgctttccttgcatgcattgtcttaggttcaatccttagcactgtacaaactaggcatggtgatgtacactgtaatcctagcacacagggggtggaggctgggagactaagagttcaaggttatcctgagcttcatgagaccctgtctcagaaaacaaacaaaggaaaaaatattacttcagtctctgccttcgccttaacatagccactacatctgtgttgttttatgaagacatcagcaatattagattagaaactgcgcccacgtacctcatttttacttgatgaactctgtaaacactttataattatttattcatttattatttattcattcatttattggggtgggttgagacagggtttctctgtgaaacagctttggctattctggaactggctgtgtaggccaggctggcctcgaactcacagagatctgcctgcctttaccttccaagtgaggaattacaggtgtgtgccacactgcctgccttaaacactttattttttaaaataaggtcacattctggggtgtctggagttaagattccagcatttatttttaatgataaaaatatctcacatgccgggcggtggtggtgcatacctttgatttcagcactcaggaggcaagattcaggccagcctggtctacagtgtgagttccaggacagccagggctacactgagaaaccctgtctcaaaaacaacaacagaaacaaaacaaaaatcacacacatggacaaaccaaataaataaataaataaataaataaataaatgaacaagaatgtataattatagcatttctgtgttagaataatacttacattccccaccccctcctcggagacagtgtttctctgtgaaacagtcctggctgtcctagaacttactccgtagaccagattggcctcgaactcacagagacccgactgcttctgcattccaagtgctgggattaaaggtgtgtgccaccattgcccagcctctacttttatatttttgaggaacctccctactggttttcaaaatggctatgctagttgatgcccccaccagcagtgaatacgggaggcccttcccacacttggcttggcttttcaagtcagcatcatgaggatacatgatgcaatacctcagtaggagacagggaagccactggaatcacttacattcacaccttagcagtaaaatatagaattcttcatactttagaagataagaaagattacaaatggcttcttaggtcaggtctcaccaccaacagagttatgaaaacaatttttagagcatcagatttgtagtacagttgtgtaaggatgtccccgggatagttgttaaggcagaccctgggtgactgagctctctttcactgcttgacatccctcagacagaggttaggttgacaaaacctactgagggtcaaaaatagaaagcaagggatttgaacctatctcagtctggctctttagaacttctcaagctgtggtgctggcctctttcttccaaggactcaagaattcaaaaactgcgtactgggcaagaggtgccatgaacaaaggcctgcagctaggatggggctagtgtgttggactagactcaagagagcaaagtgaagaagaaaactgtcaagagctggctgtttgtgaagactgagctggcttctgtaggctgcaaggggccaaggttgaaactgctgggctgggtatcacctcctggggcctgtccccacccactggcttgagtgggggtcgggggctgcagtgaggccttccggggatgctggggcagcagtttctgagcaaacaaagcctgggtgtgggcaagagatgaacagtctccctgctgtggggtgggggtcagaagccaaggatgaacagtctccctgatgtggacaagggttggggccaaggaggatgacaagacggtgtccagaagcccctagaagtcatttctcctcagaaggaaacacaggctttttcaggctgaaccaggacccagagtccccctggcctcagcagccacacttacagacatctcctctgtccataggcctggctttaaatgaagtcaggagtgatgccagattcaaagagagcgagggaggaactgaaggtgcacagcctgatgctccatgaccacaatgtgtcgtctagatctgtggttcggggatcagttaggtctagggaacggaggcggcatctgaatgcccaccatgaacccctattttgtatgtatatttatctatgttagagacccataaaatctcaggttccggatgagagagttgagtctcagcggcagataatgacctctccaagataatagttactaagtaacatgtccagcattagatagcaggtgtctctgcatccaaacccgtactctgaactacccggccatatggctgtcctatacaacactctgtaagtcacattttggatgcctctgtgacagctccaagtctttccagttattgtgtctctaaactgtagtctagaaggttatggttgttcattcttctatggattcctttttctcagccagctctgtgccagcctgtcctggtagagttcatagatgactgtgaccagaaaaaaagtacttctctgggtttgaaacaaagcacttgagagaaataaagatgagaaaggatgatgtttaaagacaagtaggtgctctcaagaataagaaagtaatagaacataagttcagatctttgtctaacaacctaagctagccaccatataccttttcagatggtgagtgagtaatacgcagttgtgtaaaacagtacctgccactcctactgtagcccctcatccacatgcatgccttccttcttcctcagtgagatggtacaacaggtggaacccatatgcttcttggcaaaaatattcaaatcttgacttcaatgctgagaatgcaatgttgctttctcagactcggaacgtcattggtcaatactgctccttcatacaaagtccataaatcttcaacatggggctggcagtgacttgatggaaggtttgtcaaggtcagcatgtgcggtctacttggaaacttctgaagaggcagctatggcaagctccagccattggtatcatgatttacaatgtgtgcactgcccatggaggccaaacaataggtgtcagagcccctggaactagacttacagttggttgctagctgctataagggtgctgggaatctaatctggatcctctggaggatcagtcagctcctcccagcagccatctctctagtccctgagatgggttttgtagcattctctcatgtgatataatatatttcaaccacgacgcagagggggagttcttggtacatgtgatatgtttcactagaccagtgagaaactcctccttgaaggtcagtgacctctcctccagtaacttcctaaattcagccaagcatggtggtgcacacttataaccttagctaaggaggctaaggtaggaggattataagtgcaagacttacctgcgctacacagcaaagtttaaggccagcctgttaaaaaacaaaatcaaacaccaaagaacaatgggatgaggatgtggtatccaagcagaacccttatctacctagcatatgctagaccctggctgtaattcttagaactaagaaaacaaaaccaacattttcctggatttgctggctacccagcatcaacagagtagtccttgtcctccttgccactgttcacttctctgtcagcatctataccccatcgttaattaggattcttgacacttgggccttcaagctggatgatggacaagagacatgctggggtcctatacctccacttccttacagaagagcagctggcctggggttagctcaggaaacactggcagagtgaagtgagcctttagactcttccatccatcacaaaagtagccagggcttgtgtgagtcaccctgaggtgatagagtaataactgaaagagtccaaaattttgccagttagggctctgcctcttaggagcttgatcaagaaagttccttcatctcttaaaccttgtctctttaccaataaatttacctctgatcaccattacagagagtgaaaaccatagttttccaaccaagaaagggcaagaagacatttgtcagggcacatcacaatcacaatgacttgggtgatttacaagggcctcccatatgttcgatcatcaattctttttgtttgttttttttcccactaaaactgcataatagtaaatgtcacaggatttcaaaagtacagaaaaatgccaataattttatcttcaaaagtagttcttatgtatttatttagtatgcatgccacagcttccatgtggcagtaagaggacaattctcaagagttcgtttcctctttttgccacgtgggttctggagctagaattcaggtaatcaggcttggtggcaagtgccttgcccactgagccatcctgatggacctcaaagatggatcttgttactgccctattacaaaatcttccagaagtgttgtgataaccatcacgaaaatacagatgtaccatgagtgttttaaacaagccaaagttacccttatccatcaaatttaagctgttttcatttaccgtatttgcccagatcttgtagggaaattattaattaggatgaaaaccatactgatattatcaaaagactcccttgtctttgctacccagaatatccaccctccgggtccagcatgttgcatatacatctcttcttccatgtttttgtatttttattataaaaaatccatttgtgcacagaggacagtattaggataggagttgaattgtatatagacggtattctcccatccaagtactaaccaggcctcaccctgcttagcttatatgatcagccaagatcaagagtgtacagagtacagacatgcacggcatgctatgggacacactcttctaaactttcagcctgtgttctgaagatgtgccaatgaactattcactcataattaggcaatctggtcttcataaaaacactacgcttacaacttgtaggctgttagattgcttctcactttcttttgttaacagtgaatatctcttgcatacatcagcatgaaaacaccctggatgttttttcctaggatacacacatgaaggcatggctttcaatatcttgagttttatcaagtaatcgccaccaaccattttctatgttatctctattataagtaaaggttgtcgtatatatttggggtgcaatctgctttccccagccaccagacatatgtgcacacacacatctatcccacattctatacatttgtgctggctgattaagcaaggctttattgggcacttacagagtcagttccctgaatcggttctttttgtgatcttgcatctgtcctatgaggttttaatacacatgagacagtatgtgaagagatttgcctgagaccactccactggaagggaaaactgaatgttttaaaataaatattattgttcttttgagacagggcctcgtagcctaagctagcctctaactcacagggtacctaaggatgaccttgaacttgtcacttgatactcttccctgtatcccctgagtgttaggtgtataggtgtgcaccactacatctgtttgtgtgatggtggcaatggaactcctggtctcacgaatgctaggcaagggctctcctaactgaactaatgtccagtcaaaagaaacaggacagatggtacctattagcataccaaaatgcatgctggcctttaggttctctcagcattgcaagtatctgctacaaagcccatgcatcctggctcctctcagcgcttctcacctgccacctaccctaaacatctctagcccatgggttcccccttcccagattctcatccctatataaccctgccatatgggccatgtggtctcttggcttttgctcctcttgcttggctctttttttctctttgctctctcttctcctcctttcttattctccccctttctctcctctcattgtctgatttagtctgctgaccacacttagtctactattttctctccctgctctggattctcccaaatgcctctggttgtactcatcctcatctctacaataaaaaccttccctcaaccatatcttggagcagtagataatatcttcacttgatacagctacatccctagctccaaggaggttttgagcccacccatctttgattccagtctgacgctccttctgctgtgtaacatctgctagaacagatggtcctccccaatcagataccaagactctgtctaagatcttccagtgagcaagacactaggaagggacctggacttcctcttctactctagtctgaatccttagtgggagatcaaaggtatgaggcaaaggaaaagacagtgtccctgactgctgggctctcttgaaggcaaagccaccctcctgctccttggggattttatttcgagtgttctttcttttctgtgaagtggtgtctcattttgtagtctggtagctgcaaagaaggtgcaagctgagcaggcctggaggccaagtagagagtcttttcaatagaaaagctcttgttaccatggcgaccagagcccacatctcctcttcaggaacagagggtcccatgtttgcagagtcagggaaaccagcagctaagttgtgaaggagcagcagctctaatatggttaaggagaaggatggagagggaggaggagagcatggggccttggggagagtagggttgttcctgtacgaagacaaaggctgagaggattcaaagtcaccaaggacagaatatataattaacggtcctctgcactctcaaatccacttggaactgaactagagaaatgaggtcggagcctcagggtgaagagtaataacagtggctgccatgtgccacgtcctcaatgtttcacagacatcaccctctggagcaataccatgtgcatcgtgtattgtgtccagtaccaggttacagctagctgggcttactgactttgccaggtcatgtagctggtgattagcagtgatggtttaaatcactgtttatctgtctccaaggtccctcttctaaatcaagaaaaaagaatgtcttaagagcagaggccatggcaaggagttgctctggaattgtgctgcttctactttctaggtcattccatttcctcttgcctccttcacacccaccccagctcccagcatgaagctgagttcagcaaatgttaatggactcattgccttccctggcaaacaggcaacaggcttgtttctcagcattgagaagaacccagctcacatattctcaccatctccggttagggcaggggacacccaaaccctactggactgtgaagaccctacagtagaggttctgaactgcccttttcatctccctgggctcactggcaggaaggaaaggagaaaaaatagaattcaggaaggcaagaaagagccaagcaggtggacatcttctgctgtgggatatggtgagaacagtgcttttaaaagctgcgttcttgggctggagaagtggtggacttgtaagagtgattgttgcttaagcatgaggacccgcgttcaatccccaggacccatgtaaaaagccaggcatggtatcacacctgaaacactagcgttgtggcagttagggtaatacggggatttccaggctcattggtcattggccaagctccagtgacaggaaaataagggagagagtgaatgaaagaatggtacatcaacacccaccatttgcctctgcagtcatgtgtgggtacaccatatgtgttcatgtgccacacacacacacacacacacacacacacacatacactctcactcgctcacgtacacatgcaaagctgcatttctttgacccgagagactgaagttctttggggttgaaagctcttgagtctttgacactcacatctccccgtcaatcaagtacatagagacttctttgcatccgaaaactctttcctaggtagcatgggtgaatggaaaatgtatggcttctgaagtaaagttaactcatactgaaaccccaactaatgatgctaccttgatcaaacagataaaagttaatttaacagtgtctcattatctaaaagattttcatttcaacgcatcaaaataattattagtgaatctgttttgtactctgtttccctcaataagtcattaaaatacagcatgggtatcatgtttaaagcacgtctaaataatttttagaaataagcaatctgcacaggatgtggtgacacagacctgtaatgccagcactcagaaggcagagacaattaaatgtctgggagtttgagtgctagtattggctacaaagcaatatcaggagagctagcggtgtgacaaaatcctatctcaaaaagaagaaaggaataaatacaaggagggagggaagaagagaagaaagaaaggaaggagagagggagggatagaaggacagagagatgggggaagggggaaagagatgatctgtatttagatttcataaatttccaattgaaaaaagagattgctacacccaagttgttcccagcattttgtaaaagctctccaggccagtagagatggctcagggggtaaagacaattgctgagcaagcttggcaacatggattagatccccagaagccatacacaaatagaaggacagaatcagctccacaccgttgtcctctgacctccatgcatgcaccgtggcaagagctcccacgatgatgacgacaataatttctccttttgaaaagctctccaatggtcgaattgaacttaaaattaaatagagatgcatcaaattaagtaaaatgcagcttcccattcatcagttgtacaaaccacgtgcctggtgctccgtgtgccctctgtcatgaggccacagcacatgcagctctgcccccaagctggacaggacagtctctagtcttcccagatctgtgttcaaggcagcctttaggctgtgagctctcgacacacagtgacagtggcccagtctctgcagtgggatgccacgctttaaaaaagttcttctgtctgtacttgggggtttagcgaggggcttcaagagctagcatgttcaggttcaaatcttgcccttattactgcccaaatgggtgtctgcagaccatttgctgcacctctctgtgtctgtttatttgatggtaacataagactgataagggggcccattcaagagggctcctgggaggcctctagttcatcttgcatgtaaagcagctgaataacagccacatctatagaacacacagtaagtgttcaatagttgctctctcttgttttagattctaatataattgtcaaagatgtaaggtgtagaagagatcaaaatggtcacctactcattatatcagtgagaaaacagagccagacaaggcaaaggactcacctaaggtcatacagcaagttaatgacaaagaaccaaccaagctccctttttgccagtgctgagcttggtgatccctccactgtgcctcccctagagaatgctgacatcttcagggaaaatgcccagatcttgcaatcatataagctgctcgttctttccccaggagggaggtggcattggctaacccggccatatggtttgttctagctttctctgcagggtcgtgtaagcagagtgcccggatagccagcactaaaactcatttatttgaagatttatgagtgaataggtgagctagtttttattttgatgtagaatatatggacattttagaagaacacaaagcaggcagaaaacagaaaaacccaccagacgagaatgtgttttctttttctcatgatctttcctcaccgccaaagattgagctccatctatttctatcctttcagcactccttttgggtgaggctctgtgcctggcacacgtggccagcaaaacagatatggatgatgcccatgtgttgcttaaaatatagtagagctgtgttggccaggcttcctgttgctgtggaagatacatttgaaaatgaattaagggaaaaagaggttgatttgggcttatagtttcagaggtgtcaatctgtcactgcagggagcacacagcagggcagagtcacttacacccccaccccaagcgtgtgcaatggttgccagggagcagagagagagatggaggcgagagggaaacagagaggaaggggaagggcagagagcaggatggggaagggagatagagagagatatcgatggatgatagatggataaatgatagatgatggatgatagatagatagatagatagatagatagatagatagataatgatgacggatggagggatggatggatggatggaaggatatatatagatatagatgatggatagatagatgatggattatgatggatggatggatggatggatggatggatggatggagggagggataggtgataggtggatagatgatagatggatggatagatagatagagcgcacagttgctcatattagcttgctcttctttcacagcctatgggatgttgccatccacattgagggaagatagcgcctgtccctcagtgaatcctcttgggaaacatcctcaggcacacctagaggtgtgcttcattttcttgtttgtttatttatttatttgtcatttttaattacatttttatatattttgtgtgggtttggtttgggtggtcagatcagagtacaacttgcaggagtctgtcctctcctatcatgtgggccccaggtaccaaattcgggttgtcaggttctgaagcaagtgcctttattcagcttattagtttgctagatgcttctttatctggtcaacattaacctccacagggacagatgccattgtcactcatggccaaaataaccatgtcaccctcgtggctttgtccacaaagaaatacctcaggcttccctgagagggcatgacagggggatgagcttgaacccctcagggtctctggaagaacctggccaggggcaagcatgggtgggagtgaaatacagaaatctctctgattcgtgaactgatcttcagtcacatgccattctgttgtaaaccttcacccagccattaaaaccctccaaaaataatttatgacaaatattttggatgtgctgtgtgttcttagccagttcccaattggctcccagagaacacagctatcttcagttttggggagaatgggtgtttgctttggttttagtactgtaggaaccaagatggccagaagcttttatctgtaactctctgaccccttccaggccctggatggctaaatgtcatactgattcatccttaccacagcctgtaatatggtgagacttatttccagtttggaaaagggtcacctgaggctcagaaaaggttgatgtcttgcctcagttacacagagtctcagctgcagcaatgactttccaaccactagttcaggtatggcctctgacctccatggctgagtggttggaaagttcccctcccttcccttcccctctgttttcttcccctttcttcccttttcctcagcccttgcacaattcagggaagctagcactctggctctggcttcaccctagccctcaaggccgcatctgcaggctacaagcccagaagcccgggtgcagagggcttctacggctgctgctgctgtggctacggctgctgccagcggcgctgctgctgctgtatgaacttggaaacactttccagtgtttctgaccgtggcgccagcagtgacaaatgccacacttcccacgaggttctttctgtagattcaatctcctcatttccaagccatttcttcccactctcaccctgcctcctcccaacaaaagcctttgtctattatatgttcaactttatcgtgcacctatgcttttcttggcatcccagggagagcctagtggccacaggcaccctggcctgtagcaggcacctaactgacatattctccttactgaacttgttccaatgctgggatggcctgtggggtctcagcttttagtgtccaggctcctcactactgcccctccaacaccaccacaggagcccatggtcctcgatgacacagggtaaatcagagtcctagttcctcagactcctctgtgggttttgttgttgttctgagactgagtctcactatgtagccaaggacaattgaacttgaaattcccctgcctccgcctctgaggtgctgggttcttcttcagctttggtttgattttgttacttttggagacagggtcttgctacacagcatgggctgacttggaattctctatcttccccatctcagccccactgggtgctgggatcatggacttgtgttgctcctggccacctttggccttttgtcccttccccttggtggcacctgcccttggagccttttctacagcagcactgcctgtcccacctgggcttctgcttggaactgcaaaagcagcctttttgctgtctggggttgctctcccatttcttccccttcatctcttccccttcttggcccatcgcttcccagcatgcaaagcacagttcaaggccatgtttggggaaatgaaggacaatttaatgtggtcagtgaactcagcatacaacagtgaatcattgtgcagccaaggatgacctgaaacttacgatcctcttgccaccacctaccaagtgctggggttatacacacatgtcactgtgccagttacgtaatgcagatgatggaccccaaagcatgttagacactcactctactaaccgagccacaccccagcctcagggctttccttattttcaatatgcttgtgataacacctgccatctgttcatgcaagcagtgtgaagggtgctttgtgtctcaatgttttctcgttgttcatatgcataccttttacacacatgactactttattaaactaaagtacagctgttgaacaagactttttccttcattgtttcttctctgtgtctttttttccctacttaataaagagtgaaaatcccgcagatcaacgtgactctttctctttccttccttcttcctctcctttcctgcccccagaatgtgctaggaagaccaggctgacctcaaatagaaatccacctgcctctccctccagggtgctttggattaagagtatgtaccactactccaattctctttctttttaaagggatacatacggtaccaagctatgagcagaccagactttacaagcagttttcccatggacagacattttgacttcattgttatttttgtgttattccataaaaaatgcactgaacgttgttttcctttaaaaaaattatacccgccagggggtggtggcaaacccctttgatcccagcacttgagaggcaaaggcaggcagatctctgtgagatcaagaccagcctggtctacaagagctagttccaggacaggctccaaagctacatggaggaatcctgtctctaaaaaccaaaggaaaaaaattgtacccatttgtttgtgtgtattcatgccacggcatgagagtgaggtcagagtcaccccattgaacttggttctctccttccaccatgtgagtcctgggggccaagctcaggttgtagacttgacagaaagtgcctttacctactgagctctctcttccatccagatatatatatatatatatatatatatatatatatatatatatatatatttggtgttttgcctgcatgtgtgtctgtgtaagggtgttagctgccatgtggatgttgggaattgaatgtgagtcttctggaagagctgtcagtgctgttaaccactgagccatctctctagccccaggtccaggcttcttaattgtacatagtaaattcatagaaaaaggcaaacgtttcttttcataagttttactgcagaaaagaaaaagtgacccaatttgaaatgggatccatggggtcaggcaaagtgttggtgacaaggaagaatcccttgtcctgccctggggtctctgtaaagagagactatggtggaaggtgggcttgaggtagcgtctgctcttgttcctacagcaagaaattctagatcacaaaaggccaggtcttttcttgcaaccagggctgggacaacacaaagtccacagtgttcaagtacagtcaatttcaataaactgatgacagtttttctggaagcaggcattttccagtttgcacttccattcagtcagccaatcaacaagcactgtgttgagcatcccagaggacccacctgggatctgtgctacccgactttctggtctaggagaaataatatgcacctttatgcacaagaaagcagttgtccacatcaagagacagataaaacctgtcccaaacatggtcactcactctctctctctctctctctctctctctctctctctctctctctctctcacacacacacacacacacacacacacacacacacacacacacggacacggacacatgaccatatgaacacaaacaatctcaatcacatgctaacatgctcacacatagcctcccagccaccattccaaccctcccttcttttccttccacctgtgtgtggagaaatattaaaagccacactggagctctgggctcgttgctgtgggaaccgcaattgtgcaaaaattctgcaatcttcactggtgcacatctgaattcttgctctgaatattacagtcactgtggagtttgtgctttgaattctgagtcatttccccatataggtcagactgggatgcaaaggagggagttagtgaagactggcaattaaagacccgattactttctttcaggcagagctgagtctccaagggtgtttgctgctctgggacttccctgagccttagacaagaaagtgagcaaggagacccagagagagagacagttgaaaggtttatactttaagagaagcaatggcattcagataaggtacagcctgctcgagggacctcacagggaggggacctgggggacaagcagcatatttccgctctcctccctccccctcagctttgttgtagctctctatagcctgaatccaacagaagcccaaagtcctgcgcgatgctgaggttagcctcttgggacagagtggacagccatggcatgaagggacaaaaacaccctatctggcatcagcaatggatttttatcactcttgtttccctttctgacctgtaaaaagagattgctaacagtacggtgctgttgagagtaaatggattacgatatgcaaagcgctggaataggcccttagagaaagtcagtctgaaagcactttgttgctcagtggttctcacccagtgagagagttttctcagcctgaagggagcaaaggaacctgaggctgagattcacattttcccaaaaacctcagcaggcccctttcattagggtgtctcttggcccccaggctagaactctcttacccaccctggttgctgctggttcatttcaggcctctcatcttcaccccactctggccagcgcagaaatggcagcaccacaaacgtgcccttggacccaggtaagcaaaccattttcctaggccctgtagtcaactacctgagaccaagtagactgtgtctgagaaaataagaaaggacagtggactttctggtaccaaagaagccctctgactccagagacatcctcttccttctggcccagggaccaaggtcctattaggctctccttgcggtctgagaacgcctgtatttgagagtctcatgtataccacaagccacttgagggatttgtgcagagcaagccagggtttgtggtggggtgatgagcactgtcagccctgtctttcattttctctgtgaagacctgtgagcaagcagtggggtgtagtctgaggagcagaaacagacaggccattcctataagaagctccctgggatctaagatggggtcctatggaaaggtcacctacttccattgcagcagcaggtcttgtcactgtggtgtcctctaggatagtaccttcagagcagcccagggaccagggaagggactcttggtccaacaaggcccctgagcccaaatcctgcttttttttttctaacaaaagggtgccactggagatggggggggggacacgacacaccagagaggagattgtgagggccatcccctgattgtcacactagatctaacctaccctaaagctccagattggatcctgagcctcaccttttctctaattttaacactagggtcaggccttgaagtgctcctgtcttttccttaaggcagcccagctgcatcctactggcgggaaggcctgaggctcagtgctgggaggggtgttccccaaggtcatgaaacagggtggaagtagatcccccaggctgtcagcctcaccccattcccaggtgggggaacaaagatctggtgaggtctcagctcaaatttgacccttccagaggagcagcttggggtccgtctggtgaacgggagcagtctttgcagcggatccatggaggttctactgggggcatcctgggagcctgcgcgcgtggtacaccaggacagactcacccccgaggctgtgtgtgaagcgctggactgtggcgctttggagaaggctacctacctgatgccacccacctcggagttgccacccagggccacctctgggaacaccagcagtgctgggaatacgacatgggcgcaggcaccaaccgtgcgatgcagcggagcccattggcagctctgcaagatagaggaccacgagtacatcagcgacaggaggctggtgttggtcacctgtgcaggtatatgtgcctgccccctacctaccccacacctcaggcttcaaccactgcagccaaactttgatctccagatttccgccaccagtctcccaacccgtgcaaactcagtttcacattgatggcacactgaacctgtcatttccagatctgagcatctcctcagaggtggcctgcagactccttcctagctagatctccagagcatccacttggtcccccgtcctaacccaatctctgtttattccctccaggtagataaatttgccatgtccccaggctgcctttgctctgaggcgtggtggctgagaccaaagctctaggacttgcctacctggtctctagtcctgcctcctgcccttcaagtccaacgcacattatctctaaaccacgcccactgggttctcagtttagcaggggctcccaatcctccctccaagttacagatactcccaccgagtccagagccccactcttccttcccccacttccaacatccgaaaccctcccatcctcagagaaccaggctgtgcgattagtggatggtggtagccgctgcgctggccgcgtggagatgctggaacatggtgaatggggaacagtgtgcgatgacacttgggacctgaaagacgcgcacgtggtttgtaagcaactaaggtgcggctgggcagtgcaggcactggcgggcttgcacttcaccccaggccaaggacccatccaccgagaccaggtgaactgctccgggaccgagacatatctgtgggactgtatggggctgcctggagaccggtactgtggtcacaaagaggacgcaggagtggtgtgctcaggtcagtcagtgagcctgaaggaggtgacatatttgggatggggcagctttagtaggagtgggtctaaggcagggagtgtcccatctaccctccccatccccatcactgttgagctatcagagaccaggggttctggtcctgcctgtgctgcttgtttatatccacagcaatggccttagtaaactgatgggtaaccacccccagatgcagctgcttctgcctgttcacagctcacacttggagcagccagatctagagtcccaccagagggccggccagagcaggtggggcgggcagagggtcacaggtgcaagaagaaaaacacatagggctctctgggcccatctctgctttggggttctcagaacactctagactgactctatcacttgcccgcagagcaccagtcctggcgtctgactggaggcattgactcctgcgaagggcaggtggaggtgcactaccaaggggtctggagcaccgtgtgtgacagcgtgtggtacgagtccgaggccaaagtgctctgtcggtccttgggttgcggatcagaggtggattggcccagggggctgccacactctctggcaggtagaatgtactactcctgtgaaggagacgaactcaccctcagcaactgtttctggcggttcaacaactctaacttgtgcagccaatcgctggcagccagagtcatctgctcaggtattccttccttccccagcccctccaccactagatttagtccacaagtttcctctctgcctacagatggcttagcaactggcagatgctggcccaagaaaaaccattgcccttaccatgctcaggcagacattattaatggatcggaatggttttttgtttttgtttctgcaagatgctcaactgagatgcaaatgcatgcattaaggatttatcaaggaggtcgttgttatgtgctgagtaattggtccctgttgactggaatggttcagtaggtgaagccagtttgctatcccaaaggtgatgattttggaaagctttagattaggaaacacggatggtaatgacatgtgccacagcatctggaactatagtcatatgacacgtaccaccaagctctcggtaccttatctcagttcagtcttacactcactgtaggaggtggcttctactgcacttcaccaactccaagaccacagtggcaagtcacagcattggtgtcttagggaccataacgacaaataaatgcaagccagaggtgtagctcagtggtaggctacttgcctaccactttcctagtgtgcatggtgccctggattcaaacctcagcacctcaaggaaggataggagggaggaagagaggaaaggagggaggggaaagaaacgctagaagtcctggtgcagctggtttggtgaaataaactaaaaagaaacattgtccaaacccttgacatgctgtcacacatagtgaggccattattccaattacaaaggcattatagtatgaaagtgaggtccccacctgcaggaacccattgttagcctccctgtggggctcagagttctgacttcaagttccagctttgctgtttagcagccaggaggactgggacagttcctcaacttgtgtggcttcagaataaaggatgctcctcccggtagctggagacagggatgctatggctgctggctgtgtaggctgcacaagtaaggaagcagatcccttatgtcaatgaggacatggccctctagctgctgagttcccaaagagcaaactgaaagtggagtggggaaaggacacagggtttgtagcagtttacgcaggaagaaggaatagtccatctgtccccattctaactgaagcgtcttcccagccagctccccagggattctctcactgctaggggctctgtttctatatccttgtgcccacaatgggaaccctccatggttccagggcacttgtctgtcttgtgcagtttctagaacaaggcttgacacacagcaggtactcaggaaactcaccaaggaaatgggtggtactttctgacaggctcccggagacatcacaacctgtccacttctgaagtaccttccagagtgccggtcacgataggtgagtgtggcttctcccaacagtgcaggtgcctgtgtgtgcatctctgatcatacactcatggatgtctccctggggacagctggtgacttgtttcagagctcccaatcccaccaataaacttatctctcaggggcagggggcatcctgctgcacaggaccagtcatagaggacctctctctctctctctctctctctctctctctctctctctctctctctctctctctctgtgtgtgtgtgtgtgtgtgtgtgtgtgtttctccttgtgatccagagaggtcctaagtgctttggaaccacttgggtccaacactcctgtcctggccatgtggtggagtatcaagaggaccagtgagtgtgcaaggtttagggcattgggatctagttccctcctgcattatctcccaggcctttctgacccttgccccaccccaactcaactgagggaagcctctccaaagtctgaggaacaagctgaggttcagagtcagggttacagcagtcctgttggccagcagcactcgaaacttcagctctatttccagtcctgtgccaggtctgtctactagctctgtgtagcttggcaagcaccagggctggctcctggggctcacatccctgttgtgtgtgttagctctgtgtggtcacatctctgagcctcaggttccttgagtttgggatggtgatcaagacttctttctttcacacacatagggatctgtgtgaagttatttcatgagaccgatttctaacacttagaatgggtctgtgctgtaagagccacgtggaagtccagcactggctgggttcccttccccactgcctagatcacttgcatcctgcctcagacactcaagatatggcaagacaggggactggaggagagactgaaggactagagtcctgccagaggtcctggctatgtataaagagcagagacaggagtgagacgctaagagctgccctggctatggaacaaggctggcaggatttgcagctccctcgtccccctttgaagtcagggtggagagtcacacctactccaaaatgcaaagagagactaggcctcttggagccagctgggggtccattgtcagcatttccctggggtttacaccccagagcccccacatcaccgcattccctcacactgcttctgggtactaagtctactttctcttcctagtccaaaccatcctgtcagcagccagaaaggaaagggaagaacatgaggactggcccagtgttgtgtttttctctgaggaagcagacttagccaaagcatggggcccaacttggtggagctccgcacttggtggagcctccaagactgtgataatgtcaccatgtcataatcctagaatataaagcctgacacacatagtactaaatgattgtttgctgaacaaagactaagtgctgaaggccaggagagggggaggggagagggatccagaggaaaatttcagacagtaaatgcatttagtcaattgctcatttaatattcactcacagagcactcaccatatatgaggcacttaaaagccatggaaagatttgaatagaagaagggagggagaaatggtgaaaaggaaagggggacctttcatcaaggtggaaaggcagggaacccacatcccttcctttttctgcctgaattggagttcttgtttccagaatcttctgtgccattgagtacgaaggacaaggagtctcaagagccagcacttctcatttcctgcattgtcctgggaagtctccttcttgtctccctcatcttcatagcagttcttctcttgaaagggaaaggacaatacggtaggtgtgacgtacccacagctcttggttaggaaacctgcagttgtgaggcataggcgtcccccagtatgtgaggtgtgggaagatccccagcaggagtggtcctgcaaggacggtgcagctcaggcctggggaaaccttgacggtgggaaggattttcccagcctgcccagtagtggagcccacttagtggaggtctctcaggagaagcagactctgtgtttgtgttgggtgtggagcaaaggagctgtgtccttgaacctggaacccgaaaggctgggagacaaaaataaaaatgatgcataggctgtctgcctcccttcccttagccctccctgtttcagtgaaccaccagcacctgcccactgccatgccagcaggagtcaataactatcatgctgtccccatcaccattcccaaagaaggtaggatgtcacccgtgggggaaggcacggggaggatgggagggtagactctggaggatcaccaacgctgaagtcaaagtggcatcgacaggagagaagcctgggtcagactatgcacaggttgtgttgccttaagcaattcacagtctctctggcttagcagacaaatgactttctagttcagccttgcgccaaccctgggcttttgagttctgagcaaatacaagagaagtgtttggagtgttggttctcagaggaaatgttagctctgctcaatagatttgtgatgtcacttctcaagatgcttcccaaccagatatcccacagagtccaccactgtcaccccagaacaaagggtgagggtgtggctacattggttgtgttcattccccagcagcacacaacccagacatgatggtacactcctgtaatcccagcacatgggaggtagaggccggaggatctgcagttcagggtcatcctggctatatattgagtctgaggctagcatggcttacatgagaccctatctttaaaaaagagagaaaaaaattcttttggaatttaactttttaccatattctctgagttaaaaaaaaataggactggtagacaaacatgaaggcctgaattcagtccctaatatccatgcaaaaagttgagcatggtggccaggggctgcaatcccagtgctgcggaggctgagataggtagatccctggctctagctggcccaacagtctagactattcagcaagctccaggtgctagtaagagatcctgtcaaaatgtggtgcagggtatggtggccagtggcacatggctttaatcctacatctccagaagcagaagcaggcagatatctatgagttcaaggctagccctattgacatagagaggttcaggccagccaagggtacatactgaggcccttatctaaaacaaataaacaaaaatgaagcttctatctcttggggctggccacacacacacacacacacacacacacacacacacacacacacacacacacacacaaacacacacacacacacacaccagtcacacatcttttaggacattgcgttgtaaaacaaaatgggtcacttgctattctgtaccctgtccctgttactagactctcaacctctccccttaagtgttctgcccacattggtgctgggccctgccccccaaatcctctgttctctccccagctcccatgctgttcatcaagccccgggtccctgaggtctcggactccagttccgactccgactatgaacattatgacttcagctcccagccacctgtggccctgaccaccttctacagtgagtgctgggctggctccaggggcttgggacctgcaggagggtacctgctgatgcccacagggctttcacaggactttcttgttgctcccctgtactccccttcaaagtgccctgtgaccctggagctctgtctgtacacaggagtgtctcctgggctatgtctggctgggtaccacctcagtaccatcatcaggccctgcacatgcatctaagaatgctaagactgtgcaaaccctgagggttccagtgagacacaattcaggcaaatccttacacactcatcatccccaaaccatgtcttactctggcctgctcagcccctccactgccatgccagctcacgccttagtttgtctagcttacccactgcctgctgagaacagaaccagggaagacagcacttgcatcagggcccaggcaatgcttggacaacagaggctcccacacctctgtggatctacttggagcatgtaaaaaaaatccttgagccccatttatacatactgtgcaatcaagttagtaccagagttcagccatgtgtgacagaaaacatccaaaatcagagtcctgaaagttgggggagccccagatccctttgatgctgctgtgaagtccctagggttttgcttttatctacatgatgcagaaggcatcattgtcatatccacacagcaggacagcaagggcatccttcactcccatccctccattcagagcacaagcctgctagctgtaagagggacaagacaggaagcctccaccaaggtagctaagggttatgcaggggagggtggacactgggcaggggcagctatctccacctcacctggtgactcggggtctctgagaggatcccagaggaggatccatgggtgatgtttggtagtgggacatctgagcccaggtgtgtagggtgtgatgttgtgtcccaaatgctatgacattggaactcaaaatcattgctaggcttcaaagagctgacccacattcttaagctggatcctgagattaaagctgagcagggtaccatggttctgggccacgtggcttctcctccaccccaggaagtgcctcccagggcagatacaagtccatttctggaccagctagggcactagagatttcaaatcttgtaacatccttgtgaggaacaaccagggcatacagtcaagcccacggttggcaatatccttatgaggagcatctgtggcacaaggcagggatgggggagaccaggtttctagccaggaacctcctgtctccctgccggtccacggtagacctgagataccctagatgaaatggagccctgtcccagtcagggttgtcctcctccaggctcctggcttgagacggagcctgtatgtccacctaccctgttttcctgcagattcccagaggcatcgggtcacagaggaagaggcccagcagaacaggtttcggatgccacccttggaggaaggtgagtccacagtggatgggccttggagaagataagcagggtgccaaccttgcctccaaactcagtagctcaactcaccttaggatgcactagaagaaacttctctcaactgatgtctctggcctaaatattcccataagcagtaagttctgttggcagtctaatttaaagcccatcttgcttccttctttctcttttcctggcccaggtcttgaagaattgcatgtttcccacgtcccagctgctgaccccagaccctgtgtggcagatgtcccctctctgggctctcagtaccacatgaggagcaacagtgggtccagcacctcctctggggaggcctactgcaacagtcccagcagcaagccacccccatggaactctcaggtgttttcttccgagaggagtcccccccgagagcagccctccaacttggaactggctggctctcaggcaatgttttcaggtagttgtgtgccctcccaagctcccagttctatgtctaacctacccaggagaggcatagaccccaaattctgagcagctagctggctgtgtgaccttggacaagtctcctcccctctctgggccttcatttcctcatttgcctagctccagacttaggtctcctgattcctcaggctggctcctcgcagagagtaactagcttgggtcttcagcagggacagctgcagacagtgacagttccagcacctcgtctggagagtggtaccagaacttccaggcaccacccctacatcctccagtggagcagtttgaatgtccaggtaggtgtggcagaggccaggtgggggtgggggatgtgaacaggatggagaactattcggaggtttctgttagaggaagtgagctcactgtcaatggcggcattcgaacagaagctgctgggtggccacgtaagggaagtgtcagtagtagtaaggttgctggtacctactcatcctccatgcaccagcctggacctcagctctggactagacaaagttctggctggaggcagcagtgaacaacaggataagatgatttcagatggtgacacaggctcactgtctcacagcacgtggcagggatagcaactgtgcctcctgctgacctgatccttctggccccacaggactccctgacccccaactggactccactgatgaagacgaggactatgatgacattggagcagcctagcctgggtgcctgaggcttatgggtggcctctcccctacactctcctgctctaccacccatcaacttccaacaggctgaggcccctagcggaggtagaagggcgtcctcccagaccctcatcctccacccatccttcaacctgcaggagcctggagcagaaggagtgaccaactgtgtgagcactgagtcctgggtcaagcaagcagggtctggccacttctgacagtggcacttttggcagggccatgctaggtacctctgaggcctcagctcactctgccatgtcagatactctgatcctaagtctcgggaagctacctaggggctgagcagctcacccactgctgcaagataggtcctggatcaggggctgccattatcactcaggaaggccatgctgtctgaatacagagaagcacccatttagcatgggacatggccttcctgggtactgtcagctgagagtaaccaagacaaacacatgcccccacccacttaggccgatgccagtcctgccaaccagaggtctctgagtccaccacaggcactggctgaatctctatctctatccctgggcaactgaacattattctgagctccttggggtttatagagggtccctgcccagccatagagtcaagggacaggcagctcagttggggcaagagtgcagggctctacctgaagggctagaggccaccagaagctctgagtccccatagatcccccttggactaacaagaactctttgggtgaatgtagctattgcacccacgactttaaagagaacctctccacagcctcagaaaaatggagggttccagccaggctatggtggcctgtcctgagttcctgagattaaatgattgctgagtgaaaatgaggtgtgttgtgacaattccttaaagtcagtgctgtgtgtgcttgtgtgtgtgtccactcgcacatgtggcagcatacacttcctcaagggtagaggagctcaaatccttgcaatggaaagttctggaggctccagtaagaattaaggaaggaggtaacaccatgcacctggccacccaggtttagtcacaagggatatctggacacacaccctaaggttgttccccgagggatgagaaatgggtatcctgtggttggatgaggacttgagagttcatcccccctctacacacacacacacacacacacacacacacacacacacacacacacccagcagccttaggagggaagcctggtgcttcggtactcccataaaatactctcaagggagaggtggcctaagagcagccaccttcctgggacactgttggtaggagaccagttgaatgcactctgccggggctccatgctagctgggcaaagaggaggcagctttgatccatttgggcagaaatgtcagaaccgccatccactgtggcctgcactctggccaaatgcagggaaaagagagctgggccagcaccatgcaaagatggagggcaggtgggagcttccctgctgctgttccctgtgtgggccaggctggctctgccagaggagctggctgtccaaatcccctggcttttcacactccacctccaccagaccagtcacctccccatgcagagtagatgctgtggtccatgctgcctggctgccatgactttaaccttgatgaagcattgttcaatgctacctgccgactgtgagtctagcctccctctgggagctagggtggttgatgggcccacttttggctcctgtccctgctgtaccagctacaggcgctcccggggcaactgtcccaggatgtggttgcctgtgctgaggtacctcctatacaagtctcgtaaccactatgggggatttctagaggagaagccaaggcttcggggcatgggggacacagggacgacactctcctggcctgaaacactgggaaagctttttgctccacagtctgggttctactcccggtgtcatgccatccgtaaatcctgtgccacctccctcaggccggctgctcaccctctctggtcctctgctagcagaagcttgactgctgtgtgtgcatagaaaatcttcagtgctgaggatgtcaagggctctgcaccaagggctcccacattgtcacactaaaaggtgatatgcacaagtctggctcatgaggctaagtagtaagctgcatgcctgtgtccctgtgtggcagccagacccagcaggagctccagcctggctctggagccctgagcttggggagggggattgtgctgggacaccagataccctgctagagcaacatactctcctggaacctgagctcagggacatagatggttcaacatgcacagagaaccaggttctgtgctgggtcctgggtgaacagagaggaatggaacctggccctcattcttgggacttcacagtctgggttgtggatggtaatggcaaacttgacaaataatgaaggtaagcagcatttgccaggtggctgtggttttatcatcctgataagggcactctgagaaaggattatctgcaccacttacaaagaaatcaaggtcagaaaggctgagtggctagccagaagtcacataggttgacatgtagcacaaattttcctcctaactcaaaagggccaacatggagccacttacttacatggtaaggacatatcatgtctaacccacaggaacctcagtgacccgcttgacacccccttgctcccaaacgatcaagcctaggaaggctaagacagaaggcaggccttttctgtcccctcagattctccattctggacacatgtgggcatctccccatactagaaggtttgtagttactaaagattcattcctcacacatactggctatttttgaatggatctgaggctttggggagaaacttctagactgaagccagcactggatagtctcaatggaaacattatcctgaagcactgacatcacccaaacacaccatctccatcttgcacaggacaccaccacattgctacagtgacagcaggaacagagacgaagaagtcagtgtctaaaagggtgtggtgggagaaaatagaataaaagaggggataactgagctggctattgaatgatgtatagtagtttgtaggataagaaaataaaaatattcacagaggcatccaaatttgggctgtgccatctgtagtccaggatcaggtactccaggtaagaaagaccattgctggtgtcttggaagcctgtgtcatttccccagggtgttggtcattgttcttgagacccaggggagtgatttgataagagggaacttcagaaacatctcgctgtagaaaagaggttgcatgagggccatggggggcggggtgccttcagagcacaagaggccagcactggagatggaggacatcgggagactggagaaagacttggagttcagaaagtgttcactggtgtgggagatgattttcttacaccagcctcccaccccatcttaacagagatgccgacagccctgagatcacacacacacacacacacatacatacatacatacatacatacatacacacacacacacacacacacacacacacacacacacacacacacacacacacattgggctctagtggaggaagttgaggctgtgaactggtctttctcccaggtctatctgcctggcatggtgtgaacaggccctggctgacattctgagtggcctcgggagagtggtgaggtccacactaaaggctcctctctgtgtcttctattgtatgaatgtcatctgaggctcctcccctggcaggatggccaccaggctccaaggctcaaacgctcacttgcagggtatgcccgacaagttccattcttcacctccctgcatgtggctgccacctctgcagatttatgaagacccccttgagggtcctaaaggtgggcagggacactggaatgtggctgctcctcagggacccctctagagatgaccttgatactctggcctggcctggtgagatgggatagggtccccttggctgggaggagcaggggagcccctgtgtgaaggaaccggttcaaagtcatcttagtggaaagtttgtctcctaccacatccttcagctgtttacagcgtggcaggggcctggcatcctgacatgaaaagaggctcaccccgcaccatcatggaggaaggaccaaaatagcagctaggggagggggccagagaaaaagagaatgtcaggggcgaggtacatcccttggtgtgtcctcaccccccagggctacagtttcgtgagaactatgaagcccagaaaagtctccaaagtaggtcaaggccacctgggtggggctatggggcctgattcagtccacacactattgccaagggtggagaaggtgtttgggaagacagtgggctggagtccttgggaggatcaggagatagataaggactatgggtagcccagaagagctcaaccattctggctgcaggtggatgttgtccacccagcacaggcccacctgacaccagcctcccgccaaatctaaggatggagggcgctctgcctcagcatcatttgcctcttagaggtcaccagcttccaaatgaacttcctgcctctgacactgctctccacagcatcagctttcctgtactgtgtcataagcagaggtgagagaagtgaatcaagcacaccgtgttcctccatggccattaagcattcctccctagacctgggcttctgtacactgagctacagccaagcccaaccctgccctgcattctcccttactgggtgcaacaatcattctctggatttcatctcccccctgacctccatccttccctgacctccatcttccccttggcccttcctctgccctccaagtatgtagtcaccatacttctgaggatgagagcctaacatactcatatcatagtgattcccaatccttactgctaagttatgacacagtgacccgctttgtgatgtgacctcaatggtcaccatttgctcctcaaaaccaacctctgcctagcatcctgacttcctaaacttggttctatgcttcctggccctcgttcatcttaccttctctgcagcttgaagcagcaggaggggccagttacagacacacagacatctatcagggaggcctgtcctctgcaggactattcatcaagagcaggtcaaccctcttggggcctagagccaaccacacacacacacacacacacacacacacacacacacacacacacacacacacacacggtgcacagtggggacagacaatacagagccacagtcaggctgtgttaatgggagcttccaaggctctggcagtaggtagctctctagggaggggcatggcagtgacactggctctgggaagaccctgagtgcccctgccagggttcctgggaactttctgtccctattcagctccccctgtttgtctggcaagactgatgtcacagctgacttggttaagtctatcttaaccccgcacacatctagaagcacatccctgcaccccagagcacctaggggagaaccttgttgcctgctctgtcccctgggatgggttccctgctcctactctgggacattcttagtgtcagccctttgtcccactgctagcaaccgtgcgagaatgcagggcagaacaccattgattcaaagtgtttcttcggcccatttttcctgtgggccttcaagattttatctgtagactgcttgttcctctggtccccttactagattttccttaaatgaattccttttgtagaaaataaaacaaaaatcaatttattctcaaggggatctttgacatttttacgaagcatctgacatgcacttcttgaagacgaaatgcaagactcaagagcagcttcctgccagaggagctggagagcggcagccttggaactcgggtttccttgcttgtgggcaggcacaaacaggcgacgtctaaggtcaagttacaggatgcaatcaaggtcaagtctcaggctctgaacgtatattgaagtctgtaaagaaatattcttgctcttaagaaaaacatcagtcatcccaacatccaggaggctgacgcaggaggatgagaggctcaagatcatccataactacatagcaaattcaagaccagcctaggtgtcaggaggccctggctcagagacagacaagcaagcaagcaagcacacagggcactaccttttcactagagtcctgtcccacggctgtggggttctagaatgctcagcagcactgttagttccaggtgaagtccagacacctagaagacagggaccatgtcctcggaaaagcatcctgtgtctccagtggaactgatctatctcaatcacacattcctggggtcccagaagttcagggtgtcgacatgaaggctagtaggtatcccaggagtggatgcaaagtgggagtagctcagagttggggaggaagagaggaagtcatcagagccaggagacgagagaacagacaccaccacgccccgacccccggcctccgcatgtcacacccaagaaaactgaacttcagaagtttgccctgactcctggccccagctggcgctgctcccttctgcctccagcacagcttcctctccatctgtccctggccacagttccttttaaaacactctttcaaaagaattattttaagactttcatgatgatacagaaaacttccctacaccctgggctcattccctgctatgaaccacttgcataagaaacatgaatttatcacaattaaaagaattaatagcagccaggcatgacagtagaagcctagcacttgagacctgagggtggggggtggagaatttaagatcaacagcaaatctgtctgatcccttcaccaagagtcttggtccaagaccaaaagatgactgtcatcttcaacccgtgtgagcagcacacccagtcagacaccatggtactggttgatgaccttgtgtgtgcctgtatgagctgccttcatccacttcagctttctcctctgtgaagctatgatttcccggtcctgtttgcttggacgttctagaaggaactagctgttcacagcacacagtggggactctgtttcaggttcctctgtatgagcaaagcttctgcacaaaggctcagaatatttccctttcagtgttttggatacacactatgcgtgttttttgaatgcttgatgctcaggccccacaaaatgcttctggcttccaaagggaaggggatttgaacaaatgcttcaattatgtgaacctggaagccatcacggtaggggatgtggacaagacaggaaaaaaggcaaatgccttagggaccttaagataactaatagcagagagagtgtccaggggcagatgccacagctggtggcatggagggattcacagggtgtgtgggacgagctgattaacagacatggtttcacttctccagctgatcagtggcagtgatggttgcaggtaattggaagcacagttaatatcactaactacacatttagcaaggcttaagactgggctggtgaggtggctcagtgagtaagagaacaagctgccaagcctcactactggagctggatcctcggaatccacatggtggaaggagagaactgactctcactagctgacctctgacctctgatctccacacgtgcaccatgacacgagcctggcccaacacaaaagaaataagtctttagaaaattaatatttgaagaagttagattttggccaggcctggtggttgtactaccagcacttgggaggctgaggcaggaggacaaacagaagtctaaggccagcctgtgaggggtcaggcagaaaagtgaaccaggaaaagaggaggatgaaaactcaggtagacttcatcgacctggatcaagacttctaaagagtctggtatcgggcggttcattaccaatgtatttaatacccttataatttggggactgggatttcctggtgtaatacaatcctcagtgcacaaggaagtgtaattatattgaaactcaactcagagttcatatcatggcttcccagaagatgggttctaaaggtgggctccctgtattagattaagggcctaaggtagagtctctcctggtctcagtcatacagatagcatagagatcatttgggctagtagccacctcaagtcctggttgtgggagcttgggggagtctctagctatcagggtcagttagattactagccatctccagtcctggtggtggaagcttgatatggtctggtccaaccaataacacagatcaccatactactaataacttccagttctcagctttctggatgcaggtttttcatcttttccattggaaagaagatcctgtgtgcttaacattcctggtttctctggagatctatgggcacaaggacctcggtgctgtgctctcaacaagcccaggctacagcgtgaaactgtcaaaagagtggcaggttttatgttacttgtattttgctacaacaggacaattgaaagaggttccggcttcagacttcagatccggcttcttctccagggaggctgcttccttttgctggtgaacaacagaaaacagtctgggtgctgggggattgacggctactagggcagagttgtctaagctatgtcaactgaccaagaagtgtgtgtgtgtgtgtgtgtgtgtgtgtgtgtgtgtgtgtgtgtgtgtgtgtacttgtgtgtgtgtgcacatccatgtacaggcatcaacttaggtgtatgcacaaatccatacacacttccgtatgtctccatcagcagctccttaaagaccatcctaaatgcacaccaatgtcccaggctagtccaggacaacatggaaggtatcaacttaggcttctcttttgtttggagccctcccccatgccaagtgtgggaagcctgactcctgccacccgctgtccactcacaaaatcattccatcctgtgcatcagtttgtattctatttccatagtttcttcattccaattaggaattattgctgggcagggtgatgcatacctacaaccccatcactcatgaggctgaggcaggaagacaatgaatcagaagactgcctgagctatgtagtgagtgagaccctgtctcgaaagaagaaagaaaggaagaaaaagatcaatagacttttgagaagcaaagcctgagcttgcctattgacttgtttattcttattgtccccgttcccaacatcgatcagaatgtcttttgcaaaacaacctattgttttatgagtatttactttttttttttttttttttttggttttggtttttcgagacagggtttctctgtttagctttggagcctatcctggcactcgctctggagaccaggctggcctcaaactcacagaaatctgcctgcctctgcctcccaagtgctgggattaaaggtgtgcgccaccaacgctcagcgagtatttactatcttgcgtgggtgagatggggtgctaagttcccagctgctcccaaggtcagatctttgtggaacaccaagtccatggtcttggggtctgactggacttctgagactttcccctcacatcagagtcccctgtggaggtgaggcaggcagaagagcagctctatggtggctgcatctgagttacccacatctgcagatgaaagggcatctacactgcaacctgccacccaccttcctaactatatttgtagagccctgcactataaggacaaatggagacacaaaggggctaaggctggtggttggagcagaggagcattctcattgttgctgaccaaactcagtgaaagctgagcatgagccagcagccaactcactcagtggaatgctcacacccggccctgaggcacactcatcacctatagggaagggatgggatggagagcccaggctagtccccatgtgtgactgcccaggatcatctggtccacatggcctccaaggcatccatcccactgtaggtgcagccgggaaagctcttgggttaattgtctctctttttttgagaagcaggtttgtttcttcctttgacgtgtatttctataaataggctacccttccacctgaacatctgtgtcccacaaagatttctcaaaagttgcagatgggtgtcactaccatccgtctttcctgccccaatttaaaacaagaatcctgtgtcaccatcacccatcaccatcctgactcctcctcatttgctgatagcacctgatatcacccctgggtgtcctccaggctataggcgctcaggcttcaccagagctgggcgtgacacctctgaacaggaaggtccccgagttcatcactttttaattaagcaagatgaaccaatgaaaagtaattagaagtgaggcttcataggagcagtgtgggagtcataagttaccatcccaaaggcagagagaaatgggagagggagacaggagctcactatttagccaaggctaccctctagctcatggtcttccagatgtgacctactaagtgctgggatgacaggcctgcgtcaccaaacctggctgacaaatggttttgtactgtattcatacagaacagaggccacctctctgcccccacatttttcactgttttcatccagtttgcaaatatgcaatctgcccatactcaagagatcctcatccttcctaacctccgcttgctccattatctcacgtaacaaccctcgggggcagccatggcattagccccaagaagactcaaacccagcccggactatatctgagacctcttcctctataccactgttagtctctcttccgtgtcacgcaccaagggtggagcaagactctactacatccattcaaggacatctgattttcctccaccaggacagcacccacacaaaaaccagaaagcaaagctttatgctttgtgcaacaagtttatcgtcaccaccatctcagcagccaccccctccccaggatctggatctgtaggtgcagtacacctccggtctgagaggcttccttgggggtggggagttgcaaagggacatttggcagcatctatgcagtcaaggggagagcactcattggcacacaacccaggtggtccagccctcacttccaggcatgactgaaggatggagctgccatcaggactttatatcgaccagacccaactcgacctcagcatcatcagaaacgattactaagctgcctgaccaagagggaagcagtgttgtaaggactggccctcgaacacataaccctctccactcactaaaaggagagattaaggcctaaggattgcagacaaagcccaggaccttgccccactttggagatgaagtcactgatgctgagagattcacactatggctaagacatgagtctacagtagaggctttcccctctctcaggccccaaactggccatccagaggccaatctgatctatagatgaactttggtattgcaatgctgaggacaaacccatggccccacccataccagacaagcatagcctttccttcacttttaaaaatttttatgtttttggagtcagagtctcattaaattgcccaggttgagcacagagtaggtgaccaccacagtcctcaagccttgtgccagggtgaggctgccatggatatagcattctcccagttggctgtgcatggccttccttgagacatctatgggtccaggaagcttgtaatccaggaaagggctatgcaaggcatctagggataacggtaggtgcttgtaagtgagcagatggatttacacaaacttttgtctgtccgtcacaaacactgaagccgctggttccaggaacagtgccttcaatgaaatgtccacagccaaccacactgcttactgagctgccattagcacctggttcttcttcattaagatgcctgccttctcaagagtctttttaaaagatggcttctcctggaaggtaccagtcatgaattgctttcttggagttcttaaattctgagagctgaaacacagtccaaagatctcattgtccaaatgatatacttttccagatttagccactggtcaagagcagggccacatgactagtaaacacttaggatttgatggctacacagacactgaggcaggcagctgattctgcccttggaccataagaagccatcactgaagtccatgcaataacacttgttctaactcaatttatctaggactctaaaaacaagagttcgaatcacgtagatgtggtcatcggtctcctttttctccgccttatggaaccacagaagctgctgctgaaggacacacggccctggtctccggcaatgactggcagcacataggcccgccttcgcattgcaagactgttttctacattgcctcatcttgtcgaaggtttgctgaagcaggatgtgattcataactctcgtccaatgtcatattttcaagactgaaattttaaaagaaaacttacatcatcattttaaaataaacttagtggaatagaactctgatacccagaaaacttacatcatccttttaaaataaacttagtgagctagaactccgatacccacccctgtccattagcatatcatcacactccctgtctccttaatccactcttcccatgcagccgtttatcgttcttcctttttaggtttttgaaatggaggcagtgtgggagggtgagtgttgataatggtgcgaaacagaaaacatcctcaaggtccatggggagatgggttgattggggtgtcatggcctccatgaaacactctctggagagttatagacagggagcccaactcactcgcttggagaggggacccagaacaccatcaagctaaaacatgaggtaagtcaagcatggataggaaaactgcattatgtcaagtgttcactctctctgtcaatctgtctctctgtctctgtctctgtgtcaatctgtctctgtctatctctctgtctctgtgtgtctctgtctctctctctgtgtctctctctgtctctctctctgtgtgtctctctgtgtgtctctctctctgtctccctctctgtctctctctctgtctctctctctctgtctctctctgtctctctctctctctctctctctctctctctctctctctctcacacacacacacacacacacacacacacacacacacacactaccagaatcagcacacagccctggggccagcagggcacagaacccatgcagactgcttcacttgaccccctgattcccggttgcatttctttctctaaaaccattttaattatataattggccctacatgggaaaaaacttaaaaaactaaaaaatctacttggctgatacataacttacatccaataaaatgcatccactttaagcaggcaggggctggggaggtgttcaatggtcatgaaaaccttctgttcttctagaggatctaagtgacgctcccagaactttcatcgagagactcacagccacatgtaagttcagcttctggggacccagcgtccccttctagcctgtaggacatgagatttcatttctcttgggcaaatgccctcatttgttagtgaatatagagaatgtgtcttcacggcataagaaacccccaatcctagggaggacctacgagtgctcccttgctatgtggacacgctgtcaaaccgccttctgactgaatacttgagtttttacccgtagatgagtgctgtcctcaaacctgtccagagaagctctgctctgcagtgggcagcagccaatgcagagactcataactggtcaaagtgctcacccccaaacaggacatagatatcaaatccctccctggagattcaggggacattgccaaagaggaacagaaagaatgcaagagctgaaggattggaggagagcggggggggggggatgctgtcttctggacatgacatggccattgcacccaagaactcactgcagccgcagctacctgcgtaagatcaggcaacattccaacagcatgtgaacaggggagggttttgggaacccatggggagaatgcgatgggggagctgtgggtggatgagatcgagatacattgcacagatgatgatatcaaagaaaaacaaaatagactttatttttactttttatttatttatttttttaattttttattttattttattttatttggttttcgagacagggtttctctgtgtagctttggagcctatcctggcactcactcttgagaccaggctggcctcgaactcacagagatcctcctgtctctgcctcccgagtgctgggattaaaggcgtgcgccaccaactcccggtgagactttatttttaaaaagagaattttaaacgtcaaaagaaattaggcatagagaaaaaagaattacatggcaaattcagtttcgtgtttacatttttctgtatcaaaggtaaatacatttttttgtttggttacatattatctttaaaaatatattattttgtgtgattaaaaaagaaaaacaaagctgggtggtggtggcgacacatgcctttaatcccagcactcaggggtcagcctggtctacagaacaagttccaggactgccagggttacacagagaaaacctgtctggaagagagagagagagagagagagagagagagagagagagagagagagagagagaacaggctgcagctttcccagagtgggagcacattacacaatcaaccacttgctcaatgtggggttttttggttttgcttttatttgcagcagtcatatgcagaatatccaaagtctgcaaatgggtctcaagctgtgggtcacaaccctttcacaggggccacacaccagatatcctgcatagcagatatttacattacgattcacaacagcagcaaaattacagttaatgaagtagcaacaaaaattattttatgggggggtcaccacaacatgaggaactgtgctaaaggctgggcagcgttaggaaggttgagaaccacggggttaaacagtgatcgttcttcatgccgtcgtcccccgagacccccatgcacaaatgaatatttgcaaccattgcttataatttagagccacttaacctaagaaagtgtatagaggttgaaggaagatacattgagccttggggttgtatatacatacatacatacatatatacatacatacatacatacatacatacatatatatatggttacacagtgagaccctgtttttaaatacatatatattcaaatacacatttaaaaatgggatctccctatatattaaaatatatttaaatatatacataaacagggtatccctggctggcctggaacttgctatgtagaccagacttgcttcaagctcacagagatctgcttatctctacctcctgatgactgggtttaaaaaacatgcaccaccacacctggctataaaaaaaagctactattatttgttacataaaaaaaattaagataccgaaaacgactccagatctttgtcctcccgcattgtttgccaggtgtcatgtgcaggtgtcactttttaatgggacatagtcacttcctaaaacaccctctgcatcttcaggcacaggaactgtcatagtaaaattttaaaattaagtaggaaacctaagtgggctgggatgcagttcaaaggtcgtatgctgctgccgagcatgcggaagccctgggctccaccccagcaccccacagccaggcatgggggtacatgctgtaaacccagcactttggtggtagaggtaggagcatggagaagtgccaggtcatccttggttgcatagcaactttgagaacaacctaggttacccaagaccttgtcttgaaaaaccaaataaaaatgaaaaaatggtaaaaaagcagaaatgagacgttccttcccaaagctaacaatccatgattcactcttccaagatacctcatatgcgtctagtccttcaagttggtccatcctgcaatgtgaacatggggtgctttagacacacacaatcttgaaaaacatctaaagtttttacacatttggtaataaattattgttatttattttatggggttattgggtgtatttgggcgctggtgcacatttggaggccagatgacaacttgtgaaagttggttctttccttccaccactggtcctgcctctgtttcccaaggacattaagttaaattaactgtattattcacaggagttgaagaaatagctactatgctggctgttctgaaatattgaggtcattttacagggaaaatatttctcaccattgagtaaatttttagggtggtaggatgtgtgtgtgtgtgtgtgtgtgtgtgtgtgtgtgtgtgtgtgtgcgcgcgcgcgcgcgtgcttattggacatttttaatcttttcttttggaaactgcaaacgttttcatcttcccctagggctcttatcttttaaacatgcatgtgtttttgaatctccgacatttacagcagtgcccccacccctcagcactcagcaaaggttaaaagaacgagtgcggatgaagtgctgatcctttctcctattgttctttcttatcagacagtttaaacttctgctcatattgctctgtggtttacagaattttaatatctatctctatttttcctttggagctcgcctcactattcacccttaaatcagataaacaccgtctatatgactacagtcccgaggatggagcccagagcgtcatgcatgccaggcaagctcccaggccactcactggtttcaccccagccccaacactgaaacctaacgcctggagtggaagctcctttcaaccactcctatttcttaagagtaacttagagcctgtcagggtaatgcacgcctttaatcccaggactcagggtactgaggctggaggatcctgtttttaaggctatcttaggctacatagttataccaactcaataaaaaaataaaataaaaaaaaaaaaccttgttggtaaattggcaaattttacccatgtatccattggttaactttgaattatttaaatgcatcatcagccccaccgccgtggtctacaaaactatctgggatagggaaggctgcttttgagctgtgagtcttgaggtccagcatcctggtaccttcatcattcaccccacacctccactctgatccctgggtttttactggcgtgatgcaggctttgaaggtcacattttccaacacttactataccctgtgtcagtttgagtgacaaactgacaagctcaaagatggctgattaattagcgaagggttcttgtcttgttttaatatttatttagtctgtgtgtacacacacacacacacacacacacacacacacacacacaaacacgaacgctcagataagtgtgcatctgtgcaccacatgtatccaggagtctctggaggtcagaagacacaccagaacctctggaactgaagttatagacagttgtgagtagccatgcaggggctgggagttgaacctgagtcttctacaagagcagcaagcactttttaactgttgagccacctctctttagccattagtttttgttggttttggtgttgtttgttttgtttttgagataggatcttgtctgtctcaggctaacctcaaattcaattatgtagctgaccttgatcttctgatcctcctggctccacctcctgagcgctgggaatacaagcacgagtcaccacacttgtcttttgaggtgcagggaatagaatccagggcttcgtgaatgctaggcaaacagtccaccaactgagccacactccagcccagttagtgaaggtgttaaaaaccatcagccccctagctggtaccctcgaaccctggcagctggaaggtgaggtgaaaggctgctgtttgaagtgggtgggacacaaatactgagggttttgaattgagcttgtattgctttgtgatttcaaagttccgtttctatttttcttcaggatctggctttaccctgggtggtttcaccacgagaatgacatttagaaactgctaagaatccaggtgtctagcatttataagccatccagtacactctgctttggaaagcagagagattttagacagcttaaaaatgatcctctttaaaaacttggcagagtggacagcaagctcacccagcgttgcctgtagaagtgggtaggatcctttcttattaattttttaagggtacaaaatgtaggtctgcttttccaatttttaagaataattttccaagttttagaccatgaacacgtttccttgatacctactttgttcttttgcctgtttgcttgtttatttgtgagacatttttcactatatagtccagtctagcctcaaacttgcagccactcttgcatccacttcaagaatgttgggattgtagatttaagtcaccacatccagccctccttgattatttttttgttacctatcttacatgagccaattaacattttttttaaaaaggaatttaagggctggagagatggctcagtgcttaagagcaccgacgctcttccagaggatcaagtttgcgtcccagtacccatgcagcaactcccaaatgtctgttcctccagttccagggactttaactcctgcttctggtctccttgggaaccagacacatatgtggtaaagatacacatatatatgcaggcaaaacacccagacacataaaataaaagcaaaaaagttgtttataaatgaatgtaacttgggataagtacaggctcacaaaaaaaaaaaaggaaggaaggaagaaaggaagagggtctagggactaaaagcttaaacactgcatgaaacataaaggagaaggcaaaaataatctggaagttcaccatggatacctaccttgcacaatgacaggtagatgtctatttctacatattcttattttcacttgtcaacatttcatagacatccttccacgccgataggtgtccatctccctcattcctatttaatggcctgcactaaagcgtttctgtcttgcaacgctgccccatgatatactgaagcatgttttctctgacatccatccatattttgaattattttgcttggtcacagacaaattaatcggtggcatgggtggagagccagcctctgctctatcttcttcttcagttaactccccaccccatcagagaccccaccagcgacaggcagtgggaatttagcacaagtactaaagagtacttgtgcaaccgagagtaaattacacagctaaggatcttctttatctgtaaaattgtgccatgccaaccctcaggcttaagtggttccccatctacagagtgtctaggtggtttccagtgctgtcttgagtcctaaacatgccgagtgcagccctgtgttaagaagcacaggtgtgtagcccctgttttacacacacagagggagagagagacaaaaagacagggaaagacagacaatgccttaagctctgagttggctctagggcacctctctccacactacctgctatcaacactgtgcccagcccccatcagtgttcagaacactggcttcttagcaaagagcctctgaggctgcacggcaagcaagagaatggaattcaaggctgggaagtggccccgtggataaagagcttgctgttaaatcatgaggaccagagttctgattcccagcacctatgtaaaaaccaggcatggtgattcatgtctgtaaccccagcatgggcagatcccaggggcttgctggccagccagtctagctgaaatggtgatctcagattcagtgagagactctgtctcaaaaacacaaggtagagaatgaatgtataaaggaagatgcacaacgtcaactcctggcctccacacatgtaattcatggataagtgcacacacacacacacacacacacacacacagagagagagagagagagagagagagagagagagagagagagagtgataatatagaagaattcttgctgtaacaatagttgttacatctattagttcacacgaatctgtggcttttcatttgactgtgatttggagcagaccgccaggcacagagattttactaataaacagctccatgaaacctgctgctaattgctcatggagatgttgaaaccatcattcagggcagtagagagggttctcaagctttgttttgtctaccaggaagctcagaagcaaacctgtgctccaccacttaccaagtgggtgggtcttatggtatgatacattacggatagccttcccatcgaagccatcttattttatagcctgtcttcttgtcatctagatattttctggttatttttcaaccttttccaacatatgcattgctaactcatacccatggtggaaggagatggggaactgataagtgttttcttcattgcacattcttgttttgtagtgtgtgcgtgtgtgtgtgtgtgtgtgtgtgtgtgtgtgtgtgtgtgtgtgtgtgtaggtgcataagtggaggccagaggacaaccttggtgacatcctcaggaagactgtccacctcctttgaagtagggcctgttattggctcggtgctcattaattaggctaggccagctggccagtgagcctccagtatccacttccccagcactggtattataggcacagaccatcatgcttggcattttgacctgggttttgggcatcaaatgcaaactctcctgtttgaaggcaaatgctttactgccagtgcccccattgcacattcccacccattaaaacagacctgttctcttggcctagcaaggtaaagcaacaaagtcagtgtacaaaatggtctatgataagctggcttctgtgaacccagaactttgcattcatgacctacagagatctaagggcagagcaaagatgctcatatcaggcacacatccccatcacagggcaagacagcactttccttctggtcttaaagatctgtgcctggctttgtgccctcgtccagcagtgatccctgactccgctatgaagccctcactgacccaagcatccagactgggaagggacgctcttccaccactccattcctctattaccctttcagccagttctgccccatgacacaccccacccctatgctacaccccacccctgggccccttctaatgctagttcttgaaatgctagtctgatttcaagggcgatcacagtcaatttcctgtttggctgcatgtagccgttccctcttaaccaatgttcagctaaagctgtggagctggctgggaccaggacggtaaggtcccctcactgcgatatttgtgacaaatccatgttcagatcatccccaacacccaagcccagcaccacacagcaatggctccaaagaaataattgcagatatcacatggcaatgttactgcacatacccgttacctggaggagggacttggcctccctctcttgtggcctgttaagtgcaggggatcactgagccagctcatgcctctagaggtgtttacttcccttctctttgtttccccatctccttgggtggctgtgattctgctgtgccaaggggtgtcagtcccgtacaaatgccaggcatggatgatggtgtgattatcaagttactgtgatagtacccagcataaatgggactcagccaatgccgacagacggggccgtctggccgtatcactttgtctaaatttccagagcccgtctgttattcacacgctgtcagtgcacattttgctgaactgtcttctttgaacagacgccacagtttcgctatgggaagggaagaagctttgccttcctttctgttttattttgtagagagatgttgctctatggtgatagaatgttaccttggcctgatttttttcttttcttccttcctttcttcctccctccttccttcctttcttatttatttattagaatgaattggtttattctggctatgctacccctgccctctgagtttttcccccctcttacttacttcttttgtgtgtaggtacctgagtgtggagaaggaagtgtcatatgtgtgtggaggtcagaagacaactttttggagttggttctcctaccatgtggtcctggggattaaactcagtcatcagacttggcagttagcacttttacctgtggaacatcatctcaccgaggtccctgtaggtgctttaaaaaactaaatgaaacatcagagtacgagctgataaaccacccccagaccttctttgtctcccacaaaccattcggccctgactgcagcccctcatcctgctgcaggactctgtttccccatgtggcctccctggattctgcctcaagcctggttgcagcattttcctgggctcatccgtaatctcctagccggctgctggggtgggggctttgctttgttttgcaaccctggaacccattgtgtagctgaggatgctctcgtacttctgatcatcctgcttccatctctggcatgctgagattacaggtgttaccaccatgcttggcttatgtgaaatgagggactgaatccaggtctttgtgccgacagagcaagcattctacctactgagctacagcccagctcgcagcctgttactttgaatggcactttcatctaagtggctttttgtttggtccttttcttttagctcctttctaagtgatacattagtctttatccaaaagataaccctgtggtgagcatttttaacccatacatctttatcttcttctaaatggagttctttcagttagtacattaaaagcaagaagtgtcatcacgtttttcctggtttaaatgtaatatacattggaagcacctcagatatgcctcccccctaccaaaatgctcctatgacatggggacagctttgagcagaaatcaacaggctcactactcttctctcttctgtcttacagcagggtgaaaacttagcttcataaaggaaatgcatttgtaaaggtgtccccttcttctgtagggagagaagggcactctgcaccactggggactggacaatgcctatcaatggataaagctccaactggaatctgcagggcacatttcacttcccacatacttaccacaaaccagctgccccgggagcctctgactctgtcttctccataactactgcccagagtgttctatgtgtcccaggtttcaccccttttgtggtttctacttctttgcattcatacaaaaaatacgatttttctgatattaatctttttctctgcctgattcttggtctctgactactgaatctaaaacagcagacagtaaaaagggaaagggccttttgcaaataaaacaaaagaaaaaccctccctctcctgcatagtcatgtgttaacattttagaaaatgcatgaacatctgaacaagaaaatgtaaattacctataaacggcctgtctgctctggagaccagaaaccctgttccagcatcatttgttctaattgcccactctgcatgttcgagtgcaagttatgttcccagaacagcgtgaaagagtatgggagacaccaaatggctacttctcttcccagacacacgaccttgcagtatcattttatctttattggccttgcctccttgcggtgagatggggctgagagggcttgctccgcaagattgttgcaaagtctctgtgaagtcagactctgtgagctggggatgtggctcagctggttctgggtctgtctagcaggctggaggccctggattcagtcagtaacacataaagcaggcgtggtggcacacggcagcaggtaagaagattgaaggctgaggtcccctcagctacatacaggatttagggccagcctgggctacatgagaccctgctttacacaaacaaaaggcacagcaaaagctgagtacatcacctagccacagtcggtgtccgtttaaatagtaagtaccagtttaaactgaaactttcatcttcaaaagtaaacctctgaagccaatattttataaattaaaatgtaatctattcacatattatatatttactattttataggttaagaatacaaatcaggccgggcgttggtggtgcacgcctttaattctagcacttgggaggcagaggcaggcggatctctgtgagttcgagaccagcctggtctacaagagctagttccagagtcacagagaaaccctgtctcaaaaaaaaaaaaaaaaatacaaatcagtaagttacaagttgaaatatgtgatgtaaccaggttccagtggacaattccaaaaccatggtcacacaggctgccctgcttaaactcagtgagtcacaaaaccagacaaaaagacacaaattcagaaaagggatttgtaggggggaggggtcttgacagggatttggaagagataagagagagtggggtaagaggaatcagaatacattatacatgtgtgtgaaattgccaaagaaaaaaattaatgagagctaagttttaaataaatagaagaggacatacctgtgatcaatgtctcattctccatatgaagcaggctgctataccgcacgtcacagcccatgctagtagatatccccattaaattgaatcacttatttttagcagagccaattgctcttctcaatgtcataaaagcacagctaggttaggaatgtcattagattccccctttccaggtcctcaaaagctatttccggttcagctctacccagcttcattagcacgactgtaaagtggcttcctgagcatttgggcatttgatttatgaacaccagctaaaatgaatgcttcgactctggagggaatcaaacagtaagcaactcttctccaagagcttgaacagaaagattttcttctggaccctgtgggcaacggtggcaaccactttctggggtcttgaaaggaactggagaaatggggggttttatgccgcacaggtcacagggaaaccacattccagggcacttccctgtgcctaacaagacctagaacacacacaaagactcagtagagtgaaggaccagggtcctacagataagtgacagagctaggatgccagcagatgcagccgaggccatctaatgccctccccaaacccaaggatcccaaagagagatgagtgtcttaaatcctaggcagccactctgaatgtgcaggtcaaaggcacagtcacttcacacctaacgtttttattcccatctgctcctgcggccagataccatccaggaggagctctgggcaggtccctgtccttgatacccacctcatcttcccattgccagccttcttaactggggagacagatagtcttgtcttccagcaacccccacaacacccacacacgtaagtacagggagccaagtggtacactctcgtgggaccccgaccatggcctgagcccagaaggatagggacataggggctgtaaatatagaaggtggatgccccagggaccacactactagcactgaccactctgaacagcaagtatagtttcgctgacactgtggaaggggaagcagagaacagaaagtgcaggctctgggccccatggcggcttgcttccatctagttcctcacacttaagagctgttttaattaacacccaagacggtagagttctgcacactcccagccctccttcctggaggatccaggtcaagtccaaaccacccatcattgtcgtccttcccgctgcagaaaattactttgcctcttgggagagagcaagccactattcaatttaaattgatttccacagctggctggctggctggctggctggctgcagtcctttcgcagagaagttggagggatgagagcagactcccaaagacaaatgagaaagcatctgtctggattgttgctggaaagggcaagagaggagggatgctttaggaggccgtgaagtgggcttggaaaggggcactgacccttcaagtcaggtcaaccaacaggaatgtcaggtgtaaaatggggcagtcataatcctcagccaaaaacatgctaggcaaaactaaaaatacctaaatgtccataaccaacaaaacatgagtcatgtggtatgaagctcagagtgtactgatcttcctgcctctacctctgaccgatcaggaatttaaggttagctttggctccatacagagttcaaggctagcctggactatatgagacctttttttgtttgtttgttttaaataaaagaaagcaaagggagatgaggaggtaagggaggtactgtgagtgcacagggtggggggaggaaagggaagaaaagaggaagcgaggatggcctccagggcattgcaccaagtgcaaggagcaaagcacagaagagccggtggcatgaatgatgcatgtgaaatgtccagacaaagaaccatagccatggaaggggaaacagaagtccctaaaacaaagccacataggaagggaaggggactgactctgagtataaaatacaagtgtcaagaaattggttgtattgctaggttgtgtagtcttgtcaacttcatggctgacatgaggatgaaatgagtgacaactaaagagttggccttgcccatggccgtgagctctgcacgctacagctctgatgactaccaacacagtcctgtccctgcagctcacaacaggctggctgtccacgagcagggcctccaggcgtgtcctgtgcctggcgatgcgtattcacttgtgcctcaagacaagacttggacatttgtcctgaacctctcccattcatcaccctaagctggctctgcccaacatgactttttcctgccctaagtgtcactcatgaggtgaggtcagccttcaagccccagagaggaagggtgggtcttaggctgaacaagagtaggtaaggaagggtccagggtcaggaagaagccacggtgtggcaacacagagccccacctctctggagcaaagaaacagaagactatttgatgtgcatagtggccaatgtgcctcctgcttcaattctaaggaaacaggggctcagagatgcagcaactttccctgggtcacacagttctaaatagtcaagcaagagtcaaacctcacctatgactcaaagccaaagtaccaggacccaaaggagaagtgtaaatggaggaaaagcttgagttgaaggatggagcaaaggaagcacacacacacatacacacagacacacagacacacacacacacacacatatatacacacacacactcacagacaacacacacacacacagacacacacacacacagagacacacacacacacacacacacatacacactcacagacaacacacacacagacacacatatacacactcacagacaacacacacacacagacacacagacacacagacacacacacacacacacatatatacacacacacactcacagacacacacacacacacacatacacacacactcacagacaacacacacacacagacacacagacacacacatagacacacacacagatacacagacaccagatacacacacagagacaccacacacacactcatacatacacatatacacacacagatgccacacacacacatatatacacactcacagacaccagacacacacagagagagacacacacacacacacagatacacagacaccagatacacacagagagacaccacacacacacacatacacacacatatacacacacagacaccagacacacacacatatacacattcacacagacaccagacacacacagagacacccagatacacacacacacacatacacacatacacagacaccagacacacacatatatacaaacagagagacaacaaacacacacacatacacagagacacacgcacatagacacacacagagatacacaagacacacacagagacaaaatcatggttgtagaaacacccagctaatgccacaccaagagcattcctaaaaatttagaccttagccataccaggaaaactgaaaacattgtttggcctggaaatagagaaactacactgaatttttttttttaagtacctgagtcaatctaaattgggggttgaaaacccaccccccaataatgcagaaatacagaaacacagctggagacctggggacctagctcagtggtagagtgcttgcctggatttggacctccagtgtcctataagaggggagaaggggagatggagggagggctgagatgagagccaaccactactttgcctggccaatggatcataaacgacatgaagcctccatttcctctggctctaggtatgtgcagttgagacagtggtgctgacgagcaggatcccatgctgaattttcactgcatcatgtacagagcgggaaattgaggggaagttaggatggtggtgcctggtggctctagccttctctctccagctgtggacctacaagttctggccagcgtaattctagctgggatcctaaagaacccaaaggcactttttccccacttagccaacacctctgatgcccaggcaggacagactagaaaatactttggcccactgcccatcccagagccctaacttaggagtctaaggtgcaccctcaaagaaagttttcgttaactatagacactttgcccagaatcctcaagaaaagctgatgttgagaactccaagaacctaaaaaagccagactggaattcagcactgttacatggagctacagcttggtcgcatctgggttcttgtcccatcttggcttatctgggaagcatcctgtggcctggctagcctatgtttgtcttcctctccgcgttgcctggttacagccctgtagtccctgggaaaacacctagacctgatcccaggctttcccacagcctccctccagcctacccctctagcaactcaactccaaacacacctcctcagcgaaacaagtgcagtcacaaagttccccacccccgccccaaagagccccactagccaggacaccagccaccctaggccctagtgtactcgacagctaactgtatgccggcagcacccagccacttacacttagagttggtcaggccatgcctcatcaccatagcctggccaagagtggtgctggctgcaaagtccctggagagctttagaacaaggcatctgcacacaagggcctgaggttggtcatccactccacacctcttggtccgtcctgtggtaacagcctggaaaggacgccctgagccaggccactctggagaggattaataatgatagtgagacagtcagtatgagtcaagactatttcaggtgatggatcactctatatagtgctcaagttggctaggctctctagtccccagcctcctcatattcaaagtaaagatatttcaaggatctactaaagtgatctgggtggcccagatggcaaatagctaactataaaactgcacatccaaatgcaggtgttttgttctatgtattaatttccaagcagcacaggctcatgagctcatctggatctaacctgagtttgcaagacctttggttctggtgatggcataatgaaagcgcttgaccacccttgagttagaaaccgagagtcacaaagtgggaggactgtgtatcccatctgaagatgcataggaaaaccaattgccgtaagttcacacatcatatctacaaacaagagggacagatgtcactatcttggccttagcaggtgcagcctaagttctaacaatgtacaaagccaggtgttggttatttgtgatacatgagcagagaccggtctaaagatggagttgaagtggttgagtgagctctttcttttctttccttcctttctttctttctttctttctttctttctttctttctttctttctttctttcttttgtgtgtgtgtgggagttgagacagggtttctctctgtagccctgactgtcctggagttcactttgtagaccaggctagcctcaaacccacagagatccacctccctctgggtgagctcttccaaagaacagacacatacacaactcagagaaggaaaggtctgtgttggtgagtcgccctgagactgacctctggttccgtggtccttctaactggacctgtcatcatgttatttcttcgattcttcccccaccatcagagaacacatgtgtatgattaaaggtgaggaatcaagtcaagaatttcatttaatctgtctatgaaagggcaggttaactccaagacataccagcatgccccacatatcattttaaaacttacatctatctatctatctatctatctatctatctatctatctatccttccatcatctatattcctatctacatctatctacctacctacatatctatctacataccatctgtctacttattaagtgtgtgaaaattagggaacaacttgcagaagtcagttcttttcaccatgtgagtcttgggaattgaactcagatcttcagccttggctgcaagcacctttactggctgagccatcttatcagccctataccatgtacctctttaaacaaaggttgaagatgtatggaatctgtactgatgagcagaatgcaaatttggggcgagtttcagattcacttcattgccatcccccaactcccaccagaactacagaatagcactaacattccgtcaggattccacccaaaaagtcccaggtcataaatatgttaagagtcatggaaaatgagaaaatggaaaaacagaaaacaaaaaccaacacacacaccccatcattcccagaaaagacttagcagcctcacaagactttgcttccactgcgaagcttccggcaagcgcttgtttgcacagccagtgagaaacagaacccgccggtctccctttcgtacccccacttgcttgttctcttatgacgatgggtggcttagctgagtttcacagcaccctcagaacgtgccagtgggctggctgagactctcggggctcagtctatcatcacatcttagttacaaccacagagagattttttgtctttttttaatcttcatttcaaaggtgggtgattcgtcacggctgacaggttccagatcactactgtatatgaccataacatcactgaaaggcccccacagctcagcctccaaccccgttgggaacaaagaaaactcccaggtactttaccagacactcagagcaccatcctgtttgggacacagtcatttggcacccaagtttctcagcccgagcaacagggtgctgagcttctggaaaggaaaaatacatccaactaggatgacacaccatgactcacactgctgagacctgggggaagagggaactgtatcccctttattcacatctgacctgaaacaagggtggtcggtgtgggtccgtgtcacttctgtcgctttgcttccgtgagcgaggagaagatggctgtcacacaacataggtccagactagctcaacctgtcctgtagcctttgcttgtgtgataaaaaataaaacccattttgaaatagtaaggatggtgactgggacaatgactcagtcagtagtgtgcttgcctcaaagcatgaggacctgagttcagttcttgatgtccacattttaaaaaagacaggcatgatggttgcacttgtaattccagagctggggaaggacagacaggtggatccctggggctcagtggcaactagcctagctcaatgggtgaggatctagtcagtgaaagaccccgtccaaaaacaaaacaaaaagtggatgattcctgaggaacaacacataaggttgtggtctccccgatctctcctctctgtctctctctttcatacagacgcacatgcaaacaaataaaaataaatgtaataaaaattttgagggagtaccaagttgtcaatcgacccccgtctccaggatcttatcaaatatatcaggctgtcctcaaagttgttatgtgactcaagctcaaactcatgatcctcctgcctcatcctcttgagtgccaggacaccaactatagatgtgtgccaacacaccaagcttccattgagtacctctctaaccgcgggtctctgggctctcaaatccaacctactgaacagaccagacgaaagctcaaaatgagccaaacaaagaaagaacctcagccaacgtgtagaagcttccaggcctctacactgcctgactttgcatagaccagagatcacaagcaggtttcaattcacatgccagaattttaccatttaaccattcatggtgagctcagatacaagtttgagctgtgtctggaccctgaaaaaataagcacagcaattaattagtgacatctgtcaggagcagatgactggagttgtcctatatgagttatgtcattttgttactggtgtggacaccctggacattcttctaagtgtttggaggcagaagatcacttgtccacaggcagaactgttcagcacaccaagagtctggctcaacactcccactttctgtccaaaccaccatccatctctcttcgttttctattgaaagcaccctgtcaccctccacgcttccactcaggaaacagtaaccaggaaacagagagaaaatcaagatcccgtttgtcttgatggattcatttcgatacaacttcactcaagagctagccgcttcctgatttcacatgttaccatcaaagacaggggccagggcagaggtagggtgtgtgtgtgtgtgtgtgtgtgtgtgtgtgtgtgtgtgtgtgtgtagggggtggggttggcttcctctgtagcaagctgggctgaacttccccaagcaaaaagccatttgggatggcagtgtgaggctccagcagccaacaaaagggtcaccctggactgccacctgcttgtcccccatggactccactatcatcatctctggaaaagacaagcaataatccatttgtacataaatggaaagcaaggcccagagaggcccgtggtgtggccatggtcacactgcaaagctctgatattcagtcttctcatgctggcctggatatgtccctcctactgcaagtattgccttaggctacttgctgcagaagggtctttgctccttctccaaagggaaggaccaagagattgcatcacaggtttaagtcaccccaggatcaggacaagggctgtgacagctgcttgagtgctctggccctaccagagcaagggccatgttctagactgtttgtgagtgggaaaggactgtgggttccgggtcctacccaaaggttttcatgagtgattgctcttcacagagattcccagagtgaagagcagtccataaatgccatgaccattgtacggttaaaatccagccttggttaaactccactaatggttagaacacaggtacacctgttctttcattcatcaaactgtgcccaggcttgcagccactctctgaaaagacattgcattgaagccttcgtgctgctcagagcaaaatgaataatgtgtattgaggcaatgggacatatggagcaataaaacaaaaaagcacaatgcagcccggcgttgcgcatgcctttaatcctagcactcgggaggcagaggcaggcggatctctgtgagttcgagaccagcctggtctacaagagctagttccaggacagcctccaaagccacagagaaatcctgtctcgaaaaaccaaaaaaaaaaaaaaaaaaaaagcacaatgcaagccatgctacatcaaaaacacaggtgaatcccaatcccacaagaggccagatgcaaagaacaaaccctccacagctccctttgtctgaaattcagaataggtaaagctgaccaacagtgatagacaaaatgaggctatactcttagtagatgggaaggagcctggggaaccttctagaaagaagacgtaatctatttcttgagctgggtgctggttatgtaactgcataaagcaaaacaaaacaaaaaatatgtaggggccagcaagatggcttagaagataaaggcacttgccgcctagcctgacttgagttcaatccccaggacccacatggtggaaggaaagaacaaagtatcctctcatctccaaatacatgctttgtcatgtatagacacagttacagaaacagacagacagacacattcacccacacacacacacacatacttacatacactcacactctcactcacatactcacccccccacacacacacaccccccacacacacacacactcacacacactcactctaaaagctttacagtcttaactcatgcttgtctatgttcccagagctgattagatttgtcagtctgtcctatgaaatatgacactggggattctgccagtccgtttgtatgtcccagcaccttcaatggacagtcctcctgccaaccaggggcaaggctgtctctggagccatggcagacgaacaagcccctttctactgcttgctcatctaccatggctccagggaggaagagccatgagtgaccagggccacatatagcccatgaggtcattgttgggaattggacatgtggtcaatgacagacattgtgtttaagctccaggcttgggggtgacctagtttacagatctgtcattgcgacaggttgtctatggctcccagcctttttcttctgccagtgggactggagggagcccaaaatagaagcccctccccaaagccacagcagacaagtgactaaaaaaagaaggctggggagcagcggggcaggcagcatcaggtgggctcagggacaaacatctgtctttctgcactgaagcataggtaagggcagagaagtcacagtgatttcacatgatcccaggggccgagtaatggccccacagtaatgacaccaacttgtccccagctgggacttctcttatgacaaaacccacactccccagtcagccactcaaagtgtaacatgggcacaggaaaagtggtcacccccacttgcaagcaggggtcttcatcttcagaggagctgttccccaagtccattgtgtcaccccaaaccctccatccctcatctcccacacaccaggactgggaatactcactcaggcccggtatctctcacctcctgcctggtcttcctgcttcctgcccttgcttcctgggtgtgttttccatacctcctccagaggacagtgacactgaagtaaaggccccattgctccttccccctcaagccccactgccctgttctgttcatatacactggccttcccaccagcaaatacttgggacaattcttgccctggggtcattacacaggccactccttcttccaggatgctattcctctagaaacccatgggctttccctgaaatgcacacctcccctctccttccccttacctactttagtgctaatgtctgacacagagtatctttttacttatcttgtttactgcctgtctccccaaatttgactgtcagaaacatgccagtagggaagtttttctgttctacttattgtcgcagccaccaagagcagtgcctgacgtggagtgactagcagacatctactccacaagctgctgagtaaaaatccggtctgcagcttcttttgggtttatagtgttggcagcaaagctccgacctcctcctggtcgcctggtgcccacactcagaacaggtctacaggcgcttgtgtggctctgaccgggtcccatgcccttctgatacaaagccttaagtgatggcttgccttagtgatatccaagtcccatttacaatccacagaggtctgaggggtgtcacagtgcaaagttacaactaaagcccaggccatgctacacaaaaggggccagaaccccttgtcccaaacccagaggtggccgtcattcagttttgccctctctctgatacttgctacctacagtcatggcagtaacaatagaggccctctccctgggggaaactgagtcagagaggattcaggagaaagaggttggacagaggacatagatagcatggggcagggaactgaagtaggcctgggaggtcaccctagataccctctatgctcagcttttcccccaaccttaagcagatctttgtcacaacacaggaaacaatacctttggcttttcaatgctctttactgtgacctggtaacccctggcctagagacgtagagcaaagctctcaaggcctggtgcacaagataagggcaaggatgctcccttgttacagaggtagcagtgggagaagggccaggagatggctgagtgtatctacaagcactgctcatctgctgcatctcccagaacaggaagtactgggatagtagccttaacccacatgctgccttaacccattctttgtttaaactgctgtgtgcgcacagaaatgcatcctgaaagacatgccccattagcacataggggcttgcccctagcatcgaacctgcaggaagcatccttttgtctttttctatacaatacgaatcattttacaactagcatctaccaatacgcttagcacattaaccacaagttgcaccgatttttccaaaactcagtcctccatggcttcctgtggacccgctggctgatgaccagcctgcaacagggtccacattcaccatgggagagaatgtgcattcagagccttgctgggtgacagaggggaaaaacacaaagaaccacttcctgtggggctgggggtggcagtgggggaggagtgacacccacccaaagtgaggccccctcaatactccaccccaactctgggggcaggtggaccagacctgcaggtgataagttcccaggcatacactgagccctgcagaacacggaaccttgatgaaagattgggtacagaattggccacaggcaaaggagtccccaactatctccaaggaggatttgggcagatgcccggcagcctggcagaagtttatcaaaccccacaaccaaccacctccaagagaaagctgcctgcctgggtagggtcagcatacatgggataggagaaccagcgagacggctaagtgggtaaggaggcttcctccttaggaccctccctaggactcatgtgatagaatgaggacagaactggcttttgcaagttgtcctgtgacctccacttatgtgctagagttctaaccctatagaagaagttgtgtttgcaaggaaggaagggaagtccagagtcgtcaatgccaggcctggttacagaaaaaggccaggaccccaccccaaacacaagggatggggattggcttctgggggaaggtagccccccaacaatcccatggagggaaatggtttgcaaggactctgtttcctgccattcatgggtaagggccaggcagtaggtgatgtggaagccattttttttcctctctctggcttcctgcctgcctgtggagagtcactagtcaggggcacctcaggttaggctactgggcttggctgttcaggctttctgtgggtctgtgcctgggccataccggctgccctacggattctggtgccagaacagaaacagacctctggctttgagggaaaataacaccatctatcatgtccctctgccctgatcctctacactggcactgtagcctgtgccagtccctggtacccactgaccactgcccccacccccacacacacacactgacttggtcacgtgtccatagaatggacacacagaacagtacatccaatctctggctaaagtgctacaaaatgcagacaagcttgtgccgtgtgtgtatgtgtgctgtgtgtgaacaggggattctgaggggaacttgagatcatctgttctagtccccaagcctaggaggatctcacataggaagaatccaatcagaatggaagccagggcccttgactccaggtgctggcaccaggagtacttatggagattagagtcagggcatccaagaggcccacctcagccagctgtggtgtctgcttgccccagggtgcagtccttttctctacactcccaagactcttagatcttagatctggcactgggtgagcactgttcatgcagaagagggtcctccacccccaacaaggaaaaggacaaagcacccagctctaactcaccatgtgaccttaggcagagtcctgcccctccctgagactaattttctgcttttgttttttcttttttagacaatgtctaaaaaagactgacttccaacttggcagcgatctcctgcctctgcctcttaagtattagaattgcaggagaatgccaccatgccaagcaagaatattaattttagaaacctcactaggtaacccaggctggccttgatcttgcatagatctgactgtcttctgcattgggagttctgctgggattaaaggtgtgagtcaccacgataggcaagaatattaattatagaaagacaccaaaaggagaaatatggactgaacatttagattacaggtgctgccataatttcattttttactaaacttatttcacttttaaaatcacctgtttttttttaactgagaataataaacagccagatggcatatgactgtaatatcaatgcttggtaagctaaggcaggagtataatgagttcaaggctagcagaggcttcattctgagacttcccctgcccaacacacatacacagtgaaagttttgacccacaaagcatgccaacagtgctgctaacccggaccacagctacagcttcttccacctatgtagttagttagtcgtacatccagttttgcacagcaatctggaacatattcgcagtgtttcttccctaatcctgacacaagagcaattgttgctttgcatggaaagcccccttgagtcttctaggatgcatgctgcatgtctgtggcccagtgtcttgtatgccatggggccccatgtctgtgacccagtgtctggtatgccatggggccccttgtctgttacccagtgtcgtgtatgacgttgggtcctagaacagcaattactcttactgctgatttgttttcaagatagagcctgaacagaacttggaacctaacccaatcccctctttactagtgagggagctgagaccctgagcacaaagttttagccaaataccagatcctggttggggaggctcagtgttgtaagtctgccggttcccttcaaaccaatccctaagtttgcagaaatgtctgtctcactgtattgtgctctgggtgtttaacaattgaatggacttcggcagctatttctgatcatgcgtgtacaagtacacactgtgttcacattcacaaacaagcacacacacacacacacacacacacacacacacacacacacactgagtacctgtggctgagggatctgctcacttactcatggtcatgactgttttactctctatgtgtgtctcatctcacaacctcatgttgtagaccttaagtatacacaataaaatatatgtggggctagaaagacgattcaatgggcaaagatgccagtgcctgccaccaagtccaggacacacttggtggacaggaggaccatgttttgctgttgttttgagaatcaattcttgcaggccgttctctgccctccatttgaggaacacacacacacacacacacacacacacacacacacacacacatttaaaaactcaaagaaatgaataaataaatccagggtgattttcaatagtcaggagactagaatggatggtactgagaaagaggaatattcttctacattctcaagagtttagtggagtttaaagtttacagaggcggaagctgtggccaccattttaggaacagatcgattaattaatagaagatagaatgcaagagagaaaattcacatcatttataaggaattcaatgatgtaacataaccctctaccatctctctcttcccccatcccttacctttctccccagtattgcagaataaacctaaagccgggagcttgctaggacgacattctgtcactaacttgtcctctggcctcctgggatccacttctaatcaacagggagaaagaaatgttcaaaaggtggttttgaagccattgctctttcttttggaaaaaaaaatgaaatcctcaaagatgacttgacataattaaaccaagtcacatctcacaccgtactaagaacaaactgcagctagattaaagacttctgggtaacaaaataaaacaagattcagaaaaaccatggggcaatatttactatcgcagtgtggagaagcccatcccaagcatgttacaaaaactaaaaggaatggctggtgggacggcaagtaatgccctgagttcaatccctaacccgtgcaaaggtgggagggccagttcctaaaggctgcctctggccgccacacataccccagaacacaagcacactgactcacaaagcattgcaaaaaattattttttaacttaaaaatcacaaagagaaaaaaaatgatcacttaaaatttgaaatctatgagcagtgggaaaatagtaaaagtaaatagttgcaaaccaaccaactggcctgaaggaatacttgtgatgcaaacaagagacaagagagaaaaacaacgccaaagacagatggggaaagaatggagcataggactgacaagtgaaaaaaaaaatctctcaaggttagaaattgtccaagctccttgccaactaagaaattcagatttaaaatacaattatatatttttgacctatgctattagtaaaggttaaaaacagaggtgacacccagaattgaagtactgccatcaaggatctcctataatgcctattggttcaattagaacttaatttaaagaactacttagacgtggtctttcaaatttttaactgctcaaccccttcagcaaaagcacaggctgaatccactctaggcacccttcatacagaacgttacctaaagtcccattcccccgcctttcctcagaacagggaagcagaaacagtcaggagtacaaggaggaccaaataaccacaacaggtcccaactgtggatagttactctgatgctaaagaaaaggacaagtcctcaagtgtcgtcaggaaaagtcactcacaagtaatatctaagaaatgatccattttacaaaacaaagaaagcaacaaatacccagactgagctttcagtgacggacacgtttaaggagagagtgagcaggacgcggtgagatgtgggaaaacacagctttcaaaattctgtgctgttattttttaagtgtgctttgatggtgcatgcaattctgcatatacatatcctgtatgtgtgtctgcatgattaaccacatggcccagggcaaagccatgactacttttatttttgaaatcagaaggcagtcctgggttccactgcttacccaagaaactcacaccctgtgagaggtaaagaagggttccagtgtgattcccaaacttaaggcaacacccttccccaccacagcccacctacatgacgatcggggccactgaagcctgaccgactaggtgatggaggttgtggagagctagaggtggcaagccaaggtctgtacttaagaatatttctgatcatgccagtgctgtgaccatataatacacacaatattgctaagaagcaggaaaaaaatacaaacaccttagggtagttactattagtattttggaatttttctgttaatagttttgttactcactgctcccctccatgtgtgtgtgtgtgtgtgtgtgtgtgtgtgtgtgtgcacatgagcatacgtgtttctgaaaagtgaacccagagctttatttatacatgccagataagaaatctaccattgagctatagccccagccctttccgtagcatctttaaacaatttactattgtgtgattctatatattttttaattacagcaatgattttcttaaataattcagctcttcataagctgggctggtgacatgcctacagtgggtaaaggcgcctgccaccaagcctaaggacctgatttttactctggagattcacatagaaggatagaattcactcctgaaagttgtcctctggtacccacacacatacacaaaataaatgaataaaatataagaagaataccttaaatcttcataagtactaaaatgtaaagatatagatgagcagctatggcttgcacctttaatcccagcactagaaaggcagaagtaggcggatctctgagtctgaggccaaactggtctacagagcgagttccaggacagccagggctacaaagagaaaccctgtctcaaaaacccaaaagtaaataaacaaacaaataaaatttaaagctaaatcaaaccttaatagtgcgccattttaatttgtgtggcattaaatttcatcccttatctagtgccggcttgccacaccagggcatctcatctaagacaacgtttacagaaaacaacatgttgtgtttcataccacacagaaaaattaattctgggtggattacagggataaaggcggttaaaaatgtcacaggaagacttgcacaaagttgatgaaaacttttaccaaggctttctgtcagggaaccctttctaactctagcgctgcatcagaaaccacagcagcaacaacagaaaaaagataactccatttggctgcctagcattttgaagtaaaggtcaaatagcaacctgaggaaaatatttgtgacagttgtgacaaaagatgaatatccataataaagagctcacacaaatcaataaaaagttgcccactgagaccccaatatctaataaggcaaaaagacttgggatggtttgttgcccaagacaacagccactaaccattgcagaatatatacatttagatttaaattaaaggcttaaatgaattaattctacatttaaattaataatttgtgttctgtagtggtttctggctggtggttattaaatgatgtggatttaggcccttttttatatactataaagtttggttaaaaagcactgctttagacagtttggcaaaaacagacacataggcaaccactcaacacaagcaaacattcaattcacaaacaatataaagaatgcaaatgatcatctaattcgggtgaaccagatgctggttgaagaatagagatagcgacacttcaagaaatcagtaaacagtgcacactaagagctacgaagacttcaggctgtggctgccatgtgtcccagcactcaggaggcagaggcagatggatctgtgagttagatagaagccagcctggtctacagagcgagttctgggacagctattgaagagggctcccagcctgggcatccggaacaaacttataaaagcagtcttatgcaagagcggatttacccttgaattattatagattcggagaccacctccccaccctgagactgaaagtccataaacctatgattttcccaaaatgtttaatgacttgggaaatgtactcaaataaagctacatgtgaaaagcagtaagagttgagtgtggtggtgcaagcctgtaaccctggcactcaggagactgaagcaagagaatgtcaagtttactgtgggcttgggctacattacaagtcccagactgaccttggaaacctaaggaggctctttttcaaaacaaaaaccgatgtcacccatgacaaaaagacatttaaaactaacagggaagcatcaacaagaaaaaatacagggacatttttgtttaaaaataatcatcagaagtcaggaaaatatcagttggtgagaaaattctgaatattaaactcctcggaaatgttggtgtgctaatttcatgagagagggtctcacttgaactcaagatcctcctggcagagtgctagaattataggtgcattccatcaaacctggcaatttcaaatgtgtgcgtgagtggatttgaggattacgtgggggggggggcaggcaggatcatccgggtctccttgtctgctcaacatacagcagcctcaccaggcagacatttctataacccaaggcctgcaaagagccaggcctgtctgtgcacatagcagcccttctgagagatgtgagagcactgttttcactaacacaggaatgcttgcattacacatttgcatggcaaacttgggcccacaatccacttatagtaggctcttgactggggaaagacatgctttttaaaacctccaaaaaggacaggaggaagcggttccaatcttcaaacagcggttacctagggaggtgggaagaagggtttccttttttagcttaaagaaacaagaaaagatcttgcccaaggagcatgacacctttgcaatgaaaaagaaaagaaagaaagcgagaaaggtaaagctttaaaaagagtaaagttgaagttcctggaggaagacagctgttgctgtagtgagagtggccgtggggccatctagatatcagtgattaatttttccccatgaattgtatgtagttttcaaactttgtccaaaggctagtgaaaatttttagggggaaaaatggcattaagaaaaccaagcttgggggctggaaagatggctcagtggtgctcttagagcaccaactgttcttccagaggacctggggttcaattcccagaacccacatggcagctcacaactgtcaggaactgacatcctcacacagacatacatgaaggcaaaacacactaatgctcataaaaataaaaaataaaaattttttaaatctttgttaaaaagaaaagaaaagaaagcttggattggtgtagtggtacacacctttaataccagcactagggaggcagaggcaggcagatctctgagttcaaggtcagcctggtctacaaagcaaattccaggacatccaaggttacacagagaaatcttatctcagatgatagatagatagatagatagatagatagatagatagatagatagataggaaagatcaaattctgtctaaagaaaggagagaaggaaagaaaaaagaaaggaaggaagggaggaagggaggaaggaaggaagaaggaaggaaggaaggaaggaaggaaggaaggaaagaaagaaagaagaaggaaggaaggaaagaaagcaaagctcaaaggatatggaggagcatgcctgaaatcccagcatgcaggtcacacaagcagaagaattaagggttcaaatttatcatacaccaggcaggatcacatgaaccctgtctcaaaaggaaaacaacgaaagcaaactgaactccaggtccttgggtctatgagggaaactgagtctaatacagacgagaactgagggttagggtttatctgtgccaaagaagggtcacagaaagatggggcctgcctgcttatctggtgggtgctggagtataccaagcaggcctgcaggtctctccagttcccacgtgagccttgttgtccattattcacagactctaggcttgttatttcctaactttctcataaacagagcaaacagaagaggaatatgtctggaggtgtgcagctgataagaaatctatgacatttatctgtcatttatagatcttttgtttcctctgagaacctgggtgcttgccctaccccctcagcttgcccacaggatacccctgagttcagtttggtcaagcaagacaagacatcccagaccctggaaacaaagaaaaagcgctgaacatcaaaaactccacacaaggcttggtggcacacgcctgtaatcccagcactgaggagcccacatacgacaatcacgcatttgagaccagactgagccacagagttcaaagccagcctgggaaagttagtgtgcttctgtctccagataaaaagtaaaaagataaaggctgggggtgtggctcattggtagagcacttgcccagtatgtatgagggtatgagagcaatccccagtatcacaaaagggcccctcctttcgggggaagaaacacttctcagaatggattgggccagtccctcaagcagaccaaaccgtggtcccaatccctcttgttgcttggcccctcaaattctctagtgtctcgggcttctttgtcacctgaagctggagcagggtgtgggggctagccctcggtacccactgtgtttggctcacactttgaggagctggaggtagaccttgaattggcacagaagtggtctaaccatggagtctgacatggtgatacagaaacatggcagtggcaggggcacaggggttgttcagttaggagactgcttgcctagcacccacgaagccctgagttagaccctgaactaggcacggtggtgcattttctgtaatcccagtactcgggatttgaaggcaggaggatcaggagttcaaagtcctcgttgactatacagtaagttgaaggccaggataggaatacatgagactctatcttaaataataaaaatggaacaagggaacaagatgagcaagagggacatacatactctggggtcagacaatggagctgtaatatacagacaagatttcctgtcctttcaagggttatggggaacaataggttaagtagccactgcaaggaaagtactagaaaataataacttcctctggctaagtttttttctttctttcttttttttttttttttttttttttttttgcgggaaggcgggcagggggaggaatgttgttgttgccacagcaacgaagaggactaagactggggaataataggaagaaaggacccaggggccagaatctaacatccaaggcacatgaccttgggggcttcctcacctcagcactgaacaggaataaaaccggccccaacagccagacccagggacacttcagcgcagcactggggaggggacggaagtgcaggccgttgtcacctctaggagaacaagcgatggttcagagggcttggcagtttcttgagtagagagcaaatgtgctttctgtagcaaacccagaaaacacgaaaccacccttctcacagagcttttcctgggtgtgagggcagcacaggtctccagctcacagagcctttattgggtgtgggagcagcacaggtctctccggctcacagcccagtccttccatgtagaaaaatgctctgatgtgcccacagacttccaggcagctgggagaaccccagaaagcaagagggctcttgaggttccgttcatggccgagggaaatgtagaaatgtccctggcctgaggcaaccctcagaagaagcagaaaagagctgcatgccaggtggttcccaacagttaaacttgtcctggttgatatcatccccaaaggtccccaaaccctacacaatacaaacaattcttcagtcttcctttagagtcatagctagcagtcgaaggataatgggacccccaagccagttttctaccctcaagtccactgagtgctcttcagtctgaaggaatctccaagacatggattctggtgcccctgcctcactcaaaaaggtgctgccaggctagccagtgtctgtctcccagaaaacagaaacagcttcaaaggtgggtcaaccctgaggcctgaaagggcatctgaactctagaacaagcctgtcttgaagccctccagcaacactcactctcctcacccccagcctcctcacctggccctgtcctgaagagggccagacaaaggagccaagggctctcaccgacctgaccatccttgctgtgtgtctagagaacatcccccaacatgacaggccctcctaacctaagttttatgcctcaaggccacagagttgggtgtgtcctaacagaagacttcctctagtgggcagtgcccagtgtggcaccccctgggctcagaagcaacatactgggtccttgttggttccttagccagtcacatgaccacaggtggagcaccttacctccctagaaaacaggacaaagttcaccttgtcattttgtgtggttatgacattgactagtgaggccaaggtaaaaattcaccatcagcaactgactaacaatcaggagatgttgttaagggtaaccaatgttcttcctggacagggcaacagggtccctcctcatttgcaaatgaaataaaaagatattcaagggaagtcagagtctcattccaaaacagcaaaaggaactcatttcccttttaaaatattcatagggtcccagaacagctacaaatgtggctcaatataaaatcataaacctacttcaaacattataaaggagttgttgttgttactgtttttacaatttttaaaactccgttgtatagttcatatccagcagacaacgtcctaggctatgtcaaaagggtggagctgccttcaagtttaaatttttctcagaaggaggtttaaactcctaagcttgtaagaccccaggaaggagacacagaaggtctcctagacccaggcaaggtcccctagacttccaggcagctggaatcaggtagggagaagaggcctgagctcaaatcttggtttctcctgtctctccatggggtgctggagtcacctcccttcctaggtttgtttcccccattctagcctaaggtactgtcaccaccttccagggctgagaggtgagatgtattgtacaaaatgcagcatagaagccagtcaccaggaccagcgggtccacggctcaccccaccctcaaggccactctgcagcaggaaagcggctctctccgtcactgtggctttgtgtgtttacaccctccccagtcgccagctctctgaaaagtcctatttactctgtgatgtgcaatctgtgggtggcagcagagcttcgaggtaaatattgtgctctcgtgcaacacatgcgcccatcttggtagagtgcatcagtcaagtgttgtttacatcaaaatactatacagccttgaagagagaatgaacacacacacacacacacacacacacacacacacacacacacaccctacacaaaatactatacagccttgaggagagaatgaacacacacacacacacacacacacacacctacacaaaatactatacagtcttgaagagagaatgaacacacacacacacacacacacacacacacactacacaaaatactatacagtcttgaagagagaatgaacacacacacacacacacacacacacacactacacaaaatactatacagtcttgaggagagaatgaacacacacacacacacacacacacacacacctacacaaaatactatacagtcttgaagagagaatgaacacacacacacacacacatacacacacacactacacaaaatactatacagtcttgaggagagaatgaacacacacacacacacacacacacctacacaaaatactatacagtcttgaagagagaatgaacacacacacacacacacatacacacacacactacacaaaatactatacagtcttgaggagagaatgaacacacacacacacacacacacacacacacctacacaaaatactatacagtcttgaagagagaatgaacacacacacacacacacacacacacacacacacacaatactatacagtcttgaagagaatgaacacacacacacacacacacacacacacacacacacacaccctacacaaaataccatggtaaattcggaagaaaacagatacaagcaggttgataccgctcagagaaaaatccaagaacaggtcaaacgaaccagtgacaagaaaaggctaatggatacctgggtaccagcagcgagtgggaacaagcacacaatggggctggtgggcactgttcacacaggtgtgttccgtttgtgaagtcacctggtcaattacggtacaggcacttctctggatgcatcctatagttaaagtagttttctcttaactcaggcattgtgctcaggtcccagctctgtggctgcacatgtgtgaacgcaggtgtaggaaacgctaagctactgctgtgctctgcaagacagaggcaatggtaccattggatgaccagagagacagccaggggactccttgctcatgtctccaagtgttaacattgttactctgcagtgttcctctaaattaactcagtggatttacactctaaataaacaccattaaaacttgctctctcaagaaacagcaaaacaagcaaacaaacaaaaaagaaaaaaacctgtttctctgggagatctcctgtagtccaggttggcctcagacttgttacatagccaagaatgacttcccactcttaatcctcctggctcacttctcaagtgttcaaatgcgccaccttgcctgacttaaaagcaaaacttgctatcactcacataaatcatggctttggtatgttaattatgcagtttctagtgtattgaataagggcaaagtaaaacaaagtcataaacactaagattaaaatgtccacctgacctgtgagctacctcaagccctcttggaacccctagcaccatgcaagccattgtaaccgccatagtcaccaacaccatcctcattggcatcgtcattaccagcatcagcaccattgtcagcatatcatcctcctgacaccatcaccacctctgatgctgtccccaccaccatcgtgacgaatatcacacatgcaaaaccaatagataagtatttctgcaccatccttgatggccagccaggcatgaccctgaactgcatagatattaaagagtcaatagcacaggacctccagaaggattgagtactggcaagtgtgcacacctaggtgagggctctgagcagaagaggaagggagtgcagagtcccactctgcatgccacattgaggccaaggcagaggctcctctcagatttcactctattcattgctgacagacagcagcctcaactttcagagtagggagatgaccagagagaactgcagtcttccaggtcgagctcaaacactcagcatatcactttccttccttcattccctccttccttcctttcttaacacaacacacacccattttttcccttccacttttcactatgttgtccaggctagccctagacttactctgtagtccagacaaaccttgaatttgtaatcctcttggctcagcccctgagtagctggaattacaagcatgtgccatcatgttggttgacagtcatccccagatagaccccttctgcactgtcctggggtgctcgggttgccctgcaatggtcacagcagtggctacaaacctactcaggtcaccctttttaagtaagctcagtagatcatcattcatatcacatataaaaaattttgctctttaaaatcatcagaacatttgatttaaataataccatttaagggaaataaatatcttttgaaaaaaatgattgtgaaaaatagcacagttattttaaacacaaaataataaacacaaatgtccaataataaagattagttgttctatatcggggctgtgtctcaggtactatacagacatttactgaagagccataaatgggctggggataaagccaagtgacagaatatgtgaagaattctgtgtgtgtgtgtgtgtgtgtgtgtgtgtgtgtgtgtgtgtatgcacgtgcatgtgcacaaagattcaaattgagaggatatttcatcaggtaaaaatcactgtgattcaaacctgattacctgaactctattcctagaatccacataaaaagccaaaatcaaatggagcagtgcacgtctataatcccagcactccgtggggacgggggaggacctgagaatcactggcagcttgctaggcctgctaacctatagtatgcagtgcaggagaaacaaggcagaccgtgccagcttggcatgcttgctacaaacctgtaatctcagcacttgggaggtagaggcaggtggatctctgtgcggcctcagggctacacagtgaagactgaccctgtctcaataataaaagagactctttctcaacaaagtggaaagtgagaactgactcacaatttatcctctgacctgcacactgatgctgaggtatgcctccacacacacacaaataaaacaaacaaatgttaaccaaaaggaaagcaggttcaaaggtcaaataatggctggactacagttcaggggagtgtttgcccagcataggaaagtccctgcatgcatccccagcactggggaaaaaaatgtactcatatatacttgcatatgtatgtgtgtgtgtgcccatatgtgtgtagtacaaatataaaaggttatattatatataatttatatatgctgctggctttgaaacttaatgtagttattgtaattaggaacagaaagaagagaaacttaaatgtggcctactatgctctcagtggttatgcccagatggtagaactgtgggcagtttcgcttacttttttcttggtgtttcactgtttgctgaattttcttgatcagttactcgtattagcaaggaaaactacactgtaaagatctcaaatgttttagacaattacacaaacatgtttgactattttcattaagaggttttctgcagatcccttgtaagttgtctctaaatgattcctagaagacatatatatgtatgcttttgaaaataattaaacagtgtaggcatcatccataaaaacaaaagcctacccatgctcatgcttgcttccatatcgctcaagcccacccaactataaatgcatcatccttaatttaaaaaattctgcaaaatccttcatgtggatacagaaaccctgtctaactgttcatttcatgcatattttattcaaatagatgacaatgtgcaagctattataaagtttggtcacctctacatcagtgtcccagggtgtttgtccttttgtctttttcattgctcagggcagggatcactcacctctctcaggctaggcaagtgctctgccactgacctgcatcctcggcctcatctcaccttttatttttgagataaagtctcactaattgtatcctcctgcctcagcctcctgaacagctgggattacatcaggcgggctgtgccctctatgatggctctggagtgtgtggaattccctcgcatttcccctgggtcactgaaatacccctatataggaccctacctcccacccaggaggtctccctaaggagacatggtggatgagcctcctattgtttaagaactatttttaagtgacatgtatttattgtatatggttgagtgtgtgtacatgcacatgcttgggtcagtatataggcaaggagatcagagaacaacttgcagaaggagtcacttgtctccttgcaccatgtgggtttctgagatggaactcgggtgttaggcgtggtggttagggcgtttacccgctaagccatctcgctggccctgtgagtgagctttctaaagaatactgtggctttcagcatctgatcctcttacgaaagcttcacagattgctcaggtactgacactgaccccgtgaggtcacagaatgaggagtctctttgaccatcacagagagactggggtccaggggagatcctccacctcagacacacagccagtaagggctgagccaggactcatgccccaagcttcaactctatatccttctcacctgtcccacacatattgaaagctgtcattggaagcccacaaccatgggttctagaaccttccctctgagccagggtcatgtcacaggtaccttcttcaaacatgtcacacaaagggaatttaggtaatttgcttcattaagtggctcagtttcaccacagatgtgagtagctggtactgtcccagtgaggcagtaggagcctaccaagcagcgccagctcctctagggcccagggaaagtaccctcttccagactctgacctctgcttctcccaagagttcaagctgatgccctcccaccagcaagaaccaaatcctttaggtccccaaacacagaaagcccctcctctgagggcacctggcaccatcccctccccacaccatctccacaggcaggagtctagactacagctggtctcagggtcaacctcaggtacatgagaaccacctgaggatcccagcacaacaggacacacctgaagtcacacagcaaaggccacactcaaacggcaggtactggagggccggcacccctccctcacaggctagtggttgtggtcaacgcccctccaccccaagaaaggaataaagctggggtaggggtgcactccctaagttgtgcagggaaattggaaagtcagtctacactagtcatgctcaaggctgctgggtacaaaaggacattccagagactgtcattcggtcattcaacaaatacttggagtttatccaccctatagatttcattcagtcattcaacaaatattgatctcctactaagcaccttcgtggtcctcagccttctgccccctccctattctcctcctaccctgggttcctcccctttccctcacactcctagtgtcctgttggaactcctcccactcccctttccaaagggacgcgtgtctgggatcactgaggagtgacccaaaccagaaggtagagcacggcgaaactctctggagattacctggtgaagccccgacaatacgggtacgagtctgtcccgcggaggccgctgaggatctgacactggcctagggggctcactcccctcccccacctcggcctccacctagcagcggcatggaaaacccagccggctcagctgacttcctcttgtgtcatggaaagtacgggtgttaggacaggaaactgtcgcctgggatctggggtctgagcccgcacagagcctgggtcctggagggatgcaaggggcagaaccactgtgggcaattactggggcggggggcgtgtggggaggggccaggggctgcaagggggccacagacccgggagtggcaggacccaccacgaagattctctcaggtacacagctagttcctggggtaatactttcagtttcctacaaagaatggaacacagtggaagccgcctagtagatgaccctcgcgcctgggaaggggaagactggaaataagcctaaagcccggcgtttggattgcttttgataaagaagcagtctggagatctgtagaaggggatgtcagtttcctccggtgtgagactggaggctgtattcttcctttgctgctgcctacattcctcctggctggggacagtggagcagggaagctgagttcttcccagctgctctctgtaaactgtgagggaataggctgtgaaggacacttaagaaagagtaaagagcgctggggatatagctcagttggtagagtgtttgccttgtaagcatcagacactgggctccatccccagaaccgccaaaggaaaaataacagaaacactaagtcataaaggtctcctggtcacagcaggaagggactgtgcttctctttcatccctgcatttctaggtctctatgtttgtgtgtttgcttgggtttttgtttgtttgttttgtattgttttctttttcgagacagggttttctgtgcaacagtccccactgtcctggaactcactttgtaagagcaggctgacctcgaactcaaagagatatgcctgcctctgcaccaccaccaaccacagggctgtatttctagatctttcataaagtaaatgtttgatgaattaattaattaatacatgaatgaatgaatgagtgaatgagtccagattcccaaaaccatacaatatggagatctcatacccaacatgaagatctcatacctaacatggagatcacacacccaacacagagatagatctgtttctccatcactcaccctcccccccacacacacacactcactggtgcaaacccaactttcaggaagacactctcctcactgtacttgttggtaaaatgtcactcatggtctcctaggcataattcatacttcttcttttttttttttttttttttttttggtttctctgtggctttggagccttatcctggcactagctcttgtagaccaggctggtcttgaactcacagagatcctcctgcctctgcctcccgagtgctgggattaaaggcgtgcgccaccaccgcccggcaactcacacttctaattctagcacttgtgaggctgaggcaggaggattaccacaaattccaggctagcttgggctacctaacgagagcccgttttttgtttttgttttaattccccatagggcaaggttcttaacctgtgggtcgaaacccctctaggttcaaatgaccctttcatgggggtcacccaagactatcagaaaacagataattacattacaactcataacagtagcgaaattacagtcatgaagaagcaacaaaaataattttatggttggggtcaccacatgaggaactgtattaaagggttgcagcgttaggaaggttgaaaacctccgacatagagattcattgcagactacaggcttccagtctggtccactatggcactagggtggtgtagatagggctaacatgtgagctttcctcactaatccttcgatagggcctgaagttgtgcacctgcttcccacctctcacagccctagcaccactcagaaatactggcgaaaactcctgtttcacccttgctctgtccacccttctcacctcaaatcagctctccttagaacaagacaccccctctctggaatccccagcctctttctgccccacagtcccatcccgcaaggacacctggctctgtcctggaatgagcacagacggtgggcactatcccacctctgagcatctcaagcaggaagttgacaggctcgggcctccattcaaattggggcaggtggtttcacccggaggaagttgacagttcaacttcaaacaagggggctgtgacgcaggcccacattgcctgcttccctgttccacctctgcctgtgccccctccctcccagagagtgagacactgagccagacacctttaccagctgccgagctcactgaggctgaggcagcagaaggccaggtccatggactcccaccaagtgctgctggctgctgcgtacgtgctgggaacactgggtgagtccctacaaggtactgccagacaggacaccggggcacattggggtgcagggaggggaatctcaatttttcccaggtctgagtctggacacatgtgtaacatcagggaagtttaggatcacaaagcccggtcaacccgccagccttagctgggctctgcttgcccattctttcccaatgctgcccagagtcattccctctgtattattgagatttgctgctttcctcagctttgggctagaagtcagagcatttagttcccaacctatgcagccacccgctgtagtgtgcagcccagaaatgcctagccattactcggtcacctccagggagggagaaagctgatattgaggctgctgaggcagaatggtcccttcataaggatgcagaagagcagatgccgagctcaaacagcagcactgggtcagtactgaaagagtccccaactcctgaatcttgcttcagacctgaggccctgatggtaggccatcggtggcatctgaaaaggggaggttagcttgactagccagagtatgctgtgaaagttatgcctggaggcccaagccctgggctcccagtttcattatgagatcttcccatacacagcttgttgatatgttggagcagggctataaactggtgggctcttgttgtctgactactcaagaggtgtggcaggaaaggggctgctggatgccaggtgtggccgggaggaaaagacagcatcctactttgcaaagaaggggctgagaccataggtacccagtcttcacctacaacagctagtgagtgagtgtgggaatgtgaatgtttcggtgggagtgcgtgtgtgtgtgtgtgtgtgtgtgtgtgtgtgtgtgtgtgtgtgtgtgtaagagggggagagagagagagcgagagggagaacattttgaatgtgtgtatgtatgagaactgtgtggatactctcctggacactacatggcttcttcattcgtgttaccatggcttggatacccatgcataaaccccttatacatgacagcaagaggtacaaagttcttcttgacaagccttggctcgcttcctggacactgccaggacattgctgtggctccttaggtcctgagaatcccagatccaagcctttaccaccccaaaacacagccctcccctgtagcctcagatccacacacaggaaggttaagacttacccaggctccccactgagcatggactaagttcctgacaagattggcacagaccccagccccatggaacccagagtccaaaagagatggaggagaaccttcacacacacacacacacacacacacacaggaacatcatctgaaggcaagggagcacatggtccctgtgtattgttagagtttataggtaggaagcaatttcatgatgccggggttcggggaaggggggatgctcacatggccccacatgctaggcaacctatcactgagcaacatactgcctctttttacttttaaaaaatgcttttaggtttctctctgtgtgtgcacgcacgcatgcgtgtgtgtctgtgtgtgtgtgtgtatgtatgtgtgtgtgtgtctgtctgtctgtacactcatgctactgggtcagaggacaacttgcaagcaccagttccctctttctgccatgtggttccaaagatggagcttggctcattagtcttggccgagagagcctttactcacttagacatctcgctggccctcaactttttaaggtaggttctgactccgtatcctaggagtgccttgaacttacaattcccctgcttccatctccacagtaactgtacccccaggcctgactttgatgaaatccttgtaaagccattttttctgtaagcttctaaacggcacagaacgtatgagggcccctcaccccattttacagtgaggaaaaactgaggcccaggagtggcaagcccaagtagagcagatagcaagcagtatggagagcctggcccagcactgctgccctcacacagccccactgcctccataggagtaataggtccctaaagccatcctacatgtcagagcatgcctacagaagaaaactccatcagctgatacacagagatcaaggcacagggctggggacaccccaaggcctgaggaatgaagatgtgtacaacctggctcccttagagtgtcagcgaggggttcctacatcatcccctcttacaatttaatttttctgagcttccatcactgacctggcttggggacatggctcagacactgcacagcccagctgaccacacggtgactccaaaaaacaaattgagttccactctgccacttctggctaaagtgaccttgagctgtattggtaagcctcagcctcctccactgtaagcagaaagtagtcatgagcacggggattaaatgaatccactctcactagttctcgcctgcccatggtggaaacaatactcaggagacatgagggccatccagatgcaaggccagatcggacagagtcgggaggcgtcttttcagatgctcactgcaccacagaccttctcccccgttcttctgcacaggctgttcgttcattcattcattcattcactcattcatctcctaactactcagctctttacagcagtgggagacaaggcagacatcccggcctgtggcctgcccagcttacagaggagacctgtaaaaaatggaatcagcgcctgaaatctacacatgagtgggtgcccccactcagcatagagagctggctgtgcaggcacaggaccttttgaagaggatgacattacctctgtcaccctgagacccaaatgataagaagaaccagctaggcagagaaaggagggaagaggggcctgggtagagggcgccacagggtaaaggccacagggaaagatgggcctgagagactaggtggtgctagctaggagcaggcagtgagcgcagcagtcccaggatacacagctgaggttgtctttggctctaggcacaaaggatcagagccctgactgatcctggaggccagaggcttgtacaagccctgtggtcactcagcagggctccaccaagaggtcagatggtttcctagagtgaccaggacaagaattcagtcagagctgacagctaggatccatgtttatgtggatgcgagaacatgtgtgcaggtggtgtgcggggcagggcgggaagatctattttgctctcttcttagtcactcaggttgagaagaacttctctggtccttggtcttctcatctttaacacaggctgagctaagctgggcatggtggtaatcccagacctcggtaggctgagacacaaagaacccaagttccaggacagcctgggttacacagtgagtaacctgtctcaaaaaccaaacagcaaaacagagtatcagaagcctgtagctgtgtttcaaaagatgacagtggtagtttccgtagattcatccagacaacaagccctgattgagtacctactatgtgctggggcttcacggagaacaaagcgacaagatctctgccctggcgggtctgagacaaagataatatgttgtacttctagaaggtcattcatgggttggcaatagataaagggagggctgggtaggaacgggggcctgccgtgcctacccagtataggtactacaaaaagagaaaatgctcacacataggcaagggaagtgaccaagcctgccactgggtgggcctgggggatccagaggaggtgcccttagctcagcaggtccaatggagagaaagggaaagggaacccgcagagcctcctggaggatgagcttccgtcctatgaataggagaaccacgcagaacagaagggtctctcgaacactgagtcctcatcctgatctctagccagatgtgcttcagaatccatatgttttccaaatgtagatatgtagattttcattttatgtaagctatgtgcttcccatactctcaaggaggtctggggacagtactcggtcacaaaacacatgaccacttctgcggtgacacctgggttatgagggacccagaggacccccatatgctgtgtcaggtggtgggtgtgaagcacagtgctgcttacctccagctaagtatgtgactctggccaagtcatcatcccctcagaacttcagttttcccacctgaatgtggaggcaaacacaacccatttatatagggctgtgactgcaagatcaggctgcagtatggagctgggaaatacgtgaaggtcgacacacctgtaagcccagcacttgagtgatgaaggcaagagaactaaggagtttcaaggccatcctctgagacacaacgaggcctgggctacataatacccaccacacacacacacacacacacacacacacacacacacacacacacacacacacgagagggagggagaggctgccaggggaaagcacaatggtgagattattgtctcaatctgaacccactgctccttgtgtaggctccatctcccaggatgctcctggaagggcgggcggtggggggagtagggtagtgtgtgcacattggtcattaccaaaagacaccagctataaccaaagtcttcatcaggtgatctacccaagactccaaatcctggctctttctgacctcttgtttccagaaaactttaatagtctcaagttagggacaaccccactgataaattcttgttttgttttgttattccagaaaaattggttttagctgggcatgatggagcacgcctttaattccagcactgagaagccagggacaggttgagctctgagttcaaggctaggctggtctacaaatcaaattccaggacagccagggctatacagagaaaccctgtctcagcgggcatcaggggagcagggaggagagtaaaaacaatagtgaggtttctggaaccttccaagtcagccaattcagagatgagggagggaaacgggtgatcttccacaaagctggcaacctccagtgtaaacttgagctccatgaactgtcaggagatcactggttatgggataaagaggccacctgatttccaagttccatgaaaatgatttcgggggaacgtctttctctgaggagaaggtagcagcatcttcatttgaggctttaggcaagaaatgggtcttcttgagagaggatagctagcacaacagctgaggtactattgttattgccaaggtcccagcccctcactctgagccctagtgcctaccagatgctaaaccagtatgtctaggctgcaagtgacaggcaggacctccgagcaggtcagaggcagaggactaagtttgactttgccgccagctgccctgtgccaggttctgtcctgcagagtaccttgcctagcctgtggcagcctggctaccagtaaagagatccattgcagagggccatgaatatttgtagacattccaaaatccagaaaatgttaaaattcctggcagacaggtctggtacaagatggcaacttgaagtcacaggaggctgtttatctctgatacatcccattcagtgtgggaatgtgtgtgtttcactaaagacagcatcatgtgcctaaagccagggctcaggagacatggggagaaagcaggctctctcagctccaacaaatcaaaatggttatggtgacatagcccacagccgggttccctgattttcaaaaccatctgaagcttcattcagattgattttaaaaacaaaataaaagaagttttgaaagttgtgcgccctccaaaaaaaaaagaaaaagaaaagaaaaaagaaaagaaaagtgttaagcattgcctggagctaataaaactcactggtggtgagatacagcacaaggaaccacagcgagcatcatatgtgtactcagggcaggaggaagggggagataccttgaagcagctctcagggattcctctgagcctttctaagtcctgtcagcttaggcaggctcaaaaatggttggatttaatcaatgtggatacaagagactggagctaggaacagtggcttcttttgccaaggtctttctttgtctgggctagctcagcccaagtccagcactgtgggagcttgcaggatgttggacagggaaggaaacagccttagaggagaggtgtgggcggcagaggatgagatggtattatgcttccatgccccatgtccctgcagccttcagggtctccaagcagagtcctggttgtggttggctatgggagttgcaaaagggactgagcaggggtgaagtgtggctccagaggagtccagggagatgctgggcacagccttcagggctcaggcctaggaaggtgttcgcaggttcctgtgagaatcagcaaagtgaatgaaaatggtttgtggacaaagaaagcctgagtgtccctggacaagcaaagaagcagcatgcggcaagtctgctctgacaaacacctttaagacccattagaaacacaggttggcgattatgtaccgttagaccaagaggaaagtgaaggatcgtgaaactgaattccatcactttgcagagcagtgaactgagcccagagagtctgagtgagtcaccaacatcacacagcagattcagggctatgtttatccacggcacatttgttgtatcttgacagcttgaaacatgcaggaatggattaacatagagcacagcagacagcttgctccggtgggaagagcatagcctcttggccgctagctgtataggcaagatattcacctctcttagtttcctctatcaaacaggggccaaagcaataatatctatcaaatggtatagtggagagaaatgagaggtttaagctaaaaattcccagaagagtgaaaaatgctgacgacagtagtgacgatgatgatggtgatggtggcagagacgaaggcggtagtaatggtaggggtcggcaagcgtggtggtgccagcagtgatggaggtgatgtgataacaataacgatgctcgagacagcaacagtgaggataatggtgatagggatgctggtggtgaggaagacggcgatactgaggatggtgatggtggtagagatgacggtagtgaggataatggggatcagcattgatggggatggcagtggtcgttacatgacgatagtggccatggtaacagtgatggtgatggagagggaagggggagcatggttcacatgaggaccaaacagaatgagccacaccctggaatgcacagtcaccctctctcaacagatcactttcctttttacatttattattattattattggtgtgtgtgtgtgtgtgtgtgtgtgtgtgtgtgtgtgtgtgtgtgtgtgtgacacagaggacaactttggggaaccagttctccttccaccttattgaggaacgtctctcatttctgctgctgcactgtgagttccaggcaagctggtccccgagcttctgagcgattctgtctctgctgctcttgctgtgggtgtgctgggactacagatgagcaccagcagagccgacgttttaatgtaggttttgggatggaactcaagtcatctggcttgcatcacaaacacttttacctgctttccttttcagaatggcagctggtgtcagttgttcggttttcctaaggaaattctctaaacaggaccaatgctgtctgtgtgtatatgtggtgtctacccatggggcctgggatggtcaaacccagtccctgaccgacaggtttttaagtctggatgctcagggccaggagctcaattatggtcgcctctggatcaccaaactgggcaccttggagtggcagctgagcagagctagccagaggcagtcacaacctagccaagtgtttgatattcctgatgagggcagaagattaagagccctgtggcctgctgtccatgcttcccaagcaagccctctcaatcctcccactgggaaagctccccagagatctgtggtcacacctgccccacccaaacagcagcacccccatttatgagcactgagctgggcttgggcagcactaggctaagctcttcaatagagaggtccagctccatctctcagcataactcactccacactgtagatggggaaaccaatgcttaaagggttaagccaggagaacctgcttcctacgccatagacagaaacaacagagctaaccctcagagcacttgtaggactaaaacccatctctgcatcacacagcagcaaagggcaggtctaagtgtctcctttccccatagacaccactttaagcacctcaaccctcatggttttgccaaacgagtggccctctaatggtggctttcccagtccccctgagggagccagaaccagaaagaaagaggactgagagagaggtcaggacgacaggtgaggaagaacaaagggttcctgcttcctctcttgccctatagctaggcttctaccccacatcttcctgaggccaaactggctagccatggtccccaggttagctcgaattaggattaggactacaaacacatgcatagtgcctggtgtttacacatgggctctgggattgaacaaaagtccttgtgcttgcaagacagacactttactgatttagccatctccctggcatcactgttccccaaagcaattcacaccctcccaatgccagcgtgtgtgtgtcgtcctttactctgtcccatttccattttaagaagaggaatgcttccattactataaagggacagacagagtgaggagtccctgtgggcaatggagctgacatgtgtctcaattgcgatgaaggtcacgcttgtggtgtgtgttaacactcacagaatcatgcactaaagaaagatcaattctactttgtgtttccattgagaaaataaattttagaaaaagagagaatcaatggcttcaacccactaaattgattccacaaccactctgggttctaagctacagcatgaaaatccctgccctggaatctcattgacggtggggttggggacagtcaaccagggtcactgctgctccttggagcagagggcaggagggagacttcacattctgacctccttctatcctttccacagttgctttctgccatggacagtcccgaagggatgacccaggtaaggaagcatgggaagggaagtgggagagggagagagagtagggcagcagctttgggggctacgtgaggacctgcctgttaaaagaaactgcctcctccatcaacatgaaccccacacagacatcagccatgccaggacacataccggcggcacccttcatagccagagagcaccacgtgaatgctagctagcatgccccctgccccccgctccccgccccactctgtgggcaggaaacatacccaccaacaagtgtacctcacaaagccttgtttcctctctggtcctccgtggtcatggacacttgcagacagactgtggggaaaggttgtgttaggttgcaaagaggggggtgtctacacctcaatcttagaagccaccgtttctcaatcaggcaaagggtgggctacacagcatctcctactggagactgacagtggacactgagctaatgaaggccctgagaagtccctcagtgaagaatctcattgatttagttctccatgctcggggtgaaccccagggtcttgcatgtactaagcaagtgttctaccaacaagctatattcccaaccttaaacatgttttatgttggcagtctccatattcatctaccacagtcccttctccacattaaccaggataacactgtgctgagtttatatggagagaaatgacggtcctgtaaagccaccatgcagcttcaggggccttagcaggccctggggccaggacttgggcccttgcaagctgtcccaccttcaggctctagtaaaagtcacttgctgtctgagcctcacttgctcacctatggaagaggagaaagtatttccttttggaggacaaagtgaggagcttactaagccaggagcccatgaagtatctgcaatggttagatgtggaccagtcccctgaacccagctagccaggtgacctcaggtagccacagccctgttctctccataggcaggaaggaaagggcagcctggtcaatggctctaagccaaggaagcctccgagaaagccttttcattttcagatgtgttccttgaataagtaagacgtttgttcagctcaaagcttccgatggatctgctgctagtttcgtttgtctctgctcctcatctgcccttccctcctctcacccaacacctcaaggaatgactgtgcttactcctcttttacatgttctcccagaatctctttgtagagacagagacagggacagagctagagagagacagaagacatagtatctgtgacttcaactaagtgaagatcaaaaacgaagacagaatctggggaaatggctcagtgtgcaaaatgctcaccttgcaagcgtgagggccagagtgtggtccccagaactccaaacccaaaaacaaaaacaattcagacatggtgccattcccttgtcatcacagccctgtggagacagaagcaggcatgcccctgagactcactggccagattagcctgctaagctccaggctactgggaaaccaaaccccatctcaaaaaaatgggaacagtgcctgaggaaaagtgcccagagttacacacacacacacacacacacacacacacacacacacacacaggcctatgtgtcctggactcatacagatgcctttcttgtcaatgttccctaagcagtacaaagtcacaaccattcgcatagttttgcattgtgctagaattctaagtaatctagagatgacagcatacaaaggacgtgtgtgggtcagaggtagacattctgccattctgtttgttgttacagcactgggaacagaactcgagaccttgagtatgttaaacacatgctcagctgagtggtggtgatgcacacctttgatcccagaacttgggaggcagaggcagaggcaggtggatctctgagtttgaggttagcctggtccacagagctattttcaggacagccagagaaaccctgtcaacaacaacaacaaaaaaaccaaaccaaacacaaactccaccactaagctacacctccaggcccatttttgggtggttggcttgtttgtttgagagatgtgtggcccagattggcctcaaactcaccaagaatgactttgaaccccttatctttcaccttctaggttctgggatgacaggcatgtgccaccttgcctggtcctagactactttaatgaggaacttaagcatctgtggactctagtacccactgggagatcctagaagcactttccatgagttccaaggggcacctctagatgttatctattcctctccctgtcatggacctttataaagtaacaaagccacaagcctgcctataacctaaaaatttcactgtaaggtatttactcaagtgaaatagaaatacaagcccacatgctggcccacacatgtaaatttatcagcagtttgattcaccgccagcaaaacaactcacatgatacatagaaaagaaatggggaaaattcacacaatgaaatattattctaaagtcaaaaaagaaatgactttctgatctatacagaaatacacataagcctcaagtatatgtagagggcaagaggcaatagcaaatgatgctatatgattcaattcaattacatgatcctgtagaagactaatctttcatggcagaaagcagggcagaccttgccagaggctgtagccagggaaatgaactggctgtcgaggagcaagcaggaagtgtctggatgacagacagactctgtatctagatcacagagtggctgtgtgcttgtagatgtttgtcaactcccacagaacagaacccttaaaatgaaagtattctgctgcaggaaaatagtctctccataaaattgattttgttgttgttgtttgttttgtttttcgagacagggtttctctgtggctttggaggctgtcatggaactagctcttgtagaccaggctggtctcaaactcacagagatccgcctgcctctgcctcccaagtgctgggattaaaggcatgcgccaccactgcccacctaaaattgatttttgatgtcttgttttgttgagacaggatctcctatacctcaggctgtactcaaactcactatgtagatgaggacaactttgaattcctatttctcctgtctccacctgccaagtgctgggactgcagacatgtaccacccacctaatacaattgattttaaatgctaaaacacaaagatcttgggagaaagagctgggaagactgttcagtccagtaaagtgcttgtgtgtgagggcctgagttcaatccccagaacccacattagggagagagagaaaaagagagagagacagagagacagagagagggggagggagggagggagggaaggagagagagggagggagggagggagggagggaaagagagagaagcagggtattgtggacagttgtaatcctatggtaggtaggaagggcagagcaaattcccagggcttgctggccagcaggctgagctgaattggtaagtccaactcctagtgagagaccatgtctcaaaaaacaagatagacagctagctcctgaggaatgacactaaaaattgacctctgactcctaacacacatgcacacacatggagagaaagagacagagagagagagagagagagagagagagagagagagagagagagagagagagagagagagagagaccacatcaggccacacctcaggactattgaaactgaattttctttttttcttttcttttttttttttttggtttttcaagacagggtttctctgtgtagctttggagcctatcctggcactcgctctgaaactgaattttcaagattgaggggatattgttggacagaaggtgctgaggacatcttgttcacagccccaaggttctctctagctcattaatctgagtcacagtgtagggccaacagagcagcgccgtgcctgagtttctcggaagggggaaactcagaaggggaagcaagagctgagcccctgaggagagtttttcctccatcacctgacacctcccactacctctttgaccccccctcacccagatctccaggtgactctaagtggtaccaactccaagtgccagggtaaactggaggtccagataggaagcctgaggaggactgtgtgcagttccagttggagcaggagccgggaccactggagaaacacccatgagaccgagagagtgtgccagaagctgggatgtggttctctcttgactctcggccacttctctctattggacagaccccagaatcaggtcttctgtcatggacccctattgtccttctccaactgcagcacaagttcaccagccgggtgccctccactgagcctggtctgccaaggtgggtgatgttttgtggcaccctgggctgaggcctgggaaggcaagggcatggaaagggcatcccagtttcagtgccctgactataaacaggagaggggactgggtaaggggtgagccaaaagctgctgtatctggctggcaagactaaaaagcaggacctggctctgccaaatgccagccttgtcctttgcacctaatttcctgccagtaatgtgtgggactgccacctctcatggacttgagaggcagaataggggagggggagccaagtcagcttaccaacaagtcaggagccctgtgtcttcacattgtcgccaccccagttcccctccttccctccactccccactccccaccattgtctgcctgtttcattgcagagccccagatgacaacacctctacccacaaccaccccacccaccaccacgccagagcccacaggtaagaagggtcttgggcttcatggagggcaggagagggaaggggctgacacagagagtaaagatccaagaccagatctgacaaagcagttgtagtcttgaactcacaggagctgtgattacctgcacaagattaggttgtcaacactccttaatagagggaggagggacccacaagacttccctcctccctgaggaagtataggcagttaatggtcagagagacattttcttcagtgctgtggccactggtaaggtgcctgtgttcctgtaaatagccctaattaaattcattgagccaccaaaacaagccaagagagagatccagttacatctaaattccagtggaaaagattcaagtgtgtcctatgcaatgtttgggaccgttgtcacctcccgagggttcatgtgttggcactcggcagcaaggcattgtgaaagccacatacactcagacatgcctccctccttccagctcctcccagatttcggctggtgccaggatccaggggcctgacgtgctcgggtatggtggaattctacaatggcagcagaggtggcaccattctctacgaggccaaggacaggcccctgggcctggggagcctcatctgtaacactctgcagtgtggatctttcttaacacatatgtcggggcccgaggcaacagggacacctgctcctgaagagctgaaggaccccaagcccttgccaattggatgggaggtgcggaacgggagctgtgcctcgatgcaagagtgcttccacaaaacaagaccccaggagggcgcccaggcgctatcagtcatctgctccggtaagctgcaaacagaccacactccatcagtccctctgttgccttggagtggggatgtggggtcccccgatcagatgttcagattttatgagaggccggatagggatgaaggaccagctgaggcctgagcccatggcctcctctaaaaggtaggacaagttagatgaggcagtgtctgaggcatctacaacgcaatccctgccagcccaaaagagataccatctggagaagtggagtcagctgggatcctagtaggaagaggagacaaggcttcgaaactgaggcttgggcaaaggcctgggggcaaccgggaggctgcctttaccaacagggtgttttcaaatcaccagaaaggaagctggaggggtgggaaggcatgggaggtctctaaggcctggctcagagcacagcttcagaggcagcccccaaaggatgcttgctcttctgagtcctaagttctaagactggcagtgctggtggagttgaaatggagagagggaaagctgacctgtgagactctacagagccaaaccaggattggggacaggccagaagaaaccacagttcaaagcaaggcagaataaccaccaagcatgggaaggagtagatttgtgtcacccgaagtgccctactgcattatgggttctgttgccaacagacgacttggttctgggcatccttcagcttttatcggtaccttgggaggtgggaactactgttactctctttttccatgaggaagggtgcaaaaaagctcagcttccccccagtatcacatagcactagctgagttgtgcccgaaagcaatgtcaatccagagcctattctctaaacttgaactgctcaaggtgtggtcctagacaggcaccatctggagacagtttcaccactccccacactcccaacaagagccaatttcagcaggtcctcaggatttctacccaactgtaggatgcacggctctgaactataaagtctacaagcaggacagcctactctactgggcacctgctataaagtggtcttctaggcaagaagcagcccccgccccagattctctggctcagatgagaggcccatggctggctccagtcccacctacccctcagctatgaaccctaaagctctcatgcaggctacaacctgcaaaagccattcccaggctcttgctttgaagtttcttctaaatagaagattcactagggctttgaaggtgggtgttgccatggaaactaaccaaagctggtgagctcactattgactctaaatcaagcttagtagcttctgccacagattcccaagcaccaccctgattagcagacataaatacctctctaggcacctggccttactgccaaaagcctaaccgacagggttcagggccagggcagccaaattcctaggttctgtcccacccatgaagtataccagctcttcctggtccccaggtctcagtttcctccttctaaaaagccctccctattcctaaggaatagcaagagagtaaaaaggcatggccaccctgacagcttctttgttactgctgtcttgagatagctgccaccacctgcccagaagccccagggaccagaactttctggagggaagtgctggggaggctgttaggatgctcttacaaaggacagcatcttccttggcgtgctaatccctgctaaggccttcaggtcaggcctgccacctcatcatcacttcccttctgcagacttccagcccaaggttcagagccgcctggtggggggcagcagcttgtgtgagggcatcgctgaagtgcgccagggatcacaatgggccaccctgtgcgacagtcctgctgccaggggtcaggcacggtgggacgagctgtgtcgggagcagcagtgtggcagcctcatctccttccatgcgctggatgctgacaggacctccaccgggctcgtctgtacccaggagaagctgtctctgtgttaccagcttcagaaaaaaaacaactgcaagagggtgttggtcacatgtgagttgactgcagccctccctcggtgggtggagagcaggtcggaacttttcctctaggacccagtcagggagcttgtctctaaagagcagataggagaggtggataaaagatcctggaaaggggacagtaaatgagattctgggatcaagaatcagacagcaatgatgaatggacagtcaaggtccaagtggatcactgtcaggccactggcagatgctagaactctcccttgccttttatcttctgctcttcggaatacaagctggaaaatcagggggtggatggaacatatttactacacgggtggtaactaaataatgggtaaaagagagacaggtacatggatgagtgacataaatgggggtgagtgggtaagtagatagatgattgtataaatgaatggatgggtcagtcgatagacagatggacaaatagacagacaggcagatggacacagaggcaggcagatgaatagatgactgcataagcagtgggtggatagatgggtaaattgatgatagctacataagcagatagatgggtgtgtaggtggatggatggatggatggttggatagatgacggatggttggatagaaggctggctgattcttgatatgtggtcatatatggtcatcttcctgatggtaaatgggaagttgattagtcgtaattgagataaaaaattaacagtctataacaagagtggcaaatagtagcttgatggtcactgaaagtaataaagagcaggcaaatgtatggttatcaaagactcccacagacagacagctcccttatgaacactctggtggtaccagggaaatccaggcaagtgctgccctctgagttgctccccagggctgggactgatttaagactttccttgtccaggccaaaacccaaacccagcgggcctggccccaggcactgtggcaagcatcatcctgacccttgtactcctggtggtgctgttggtaatgtgcgggcctctgatctacaagaagctggtgaagaaatgtaggtgccaaaccccagctttcctcccttaccacccagctccccctgctgcacactggcctttttctgcctagagtattagaaagtcaggacaaactgtaccctctgatgggcccttgtctggacttggcaaaagcctactgcagttgatgaaggctatggccacatgatatcagcacagactctgatgtcacaacacatggcccaagtccagctccacaactaccaatggcactgacagtgctgctgcctctatctgagccttaatttccctgtttactgaatggacagctacatacttaatgaatgagggcttgtctcctggccttgcaaaccttagagaaattatccagagccaaagaaggagggagaacagaggcaagcagtcttgggtcccttgtgccctctggggtataaattctggttctaaataagccctgtggtcatttctacagtcacccaagggctccaatctccttccctagtcaattaggaaatgaggcagaaagcctggagtggtgtccccatcagtcttgcctctcttcccatctcccctcctttaccatcatctcccctcccccatcatctggccctcacaagctttctgtctgttgttgtctagtccgtcagaagaagcagcgtcagtggattggtcccaccggagtgaaccagagcagtaagtgtccccagaggcaggtctacctcagccccaggacttaggccacagaagtcaaggtctctgctgatcacagcaaaccggcaactgctagaagactcagctctccaccacatttcactaaggtgtgactgtggccagcaaatatacccacaccagagaaggctgaggcttcttctaggggcaagtggttctgcacattttgcctcttgagcctcagacaccatggtatttctgctctcttgccttgtggttgacttaagcagaggtccccacagccttcacccccaggacagccatccccaacttgatgactgacaatggtcaaacggggttaagcaaaactatgcacagtcctttagttcagtacttgtaagacccttttgtatggctccccttcaaagtgggaaggcatggcagaggattggccaagctagttttagcacagagcaacttcagagggccagttttagactacactggccctgccagcccaacccctcccctagccttcattctctcctagccacattcagagttacactaatgggatgaagcatgcactctattcctttccccttcccatgtccaggcccaaatctttctagaaaattctctgctttgtttggttttaagtaatagaaaggcccacagctcctgatgcataggagtacatctccctagcacctgtgttccagcttcctactaggtaaaagcttgatgactgagcaactggaggctgctcctggccaatcagactgctctaaaagtctgaggtttacccggctggcatgaatctccccagagagaaaggagggggaaatgtactccccctttcccatgacctcatggacacaggaagctaagctatgggctcttgctcaggaaggacagcacatcagttctaacaatgtcactggcctcctgtgtctgcttagtgtctttccatcgcagtcacacggcaactgtaaggtcccaggtggagaacccaacagcctctcatgtggacaacgaatacagtcagcctcccaggaactcccacctgtccgcttatccaggtgagcagcagggggctgctgggggtggggggtgggggcaatgctgaatgctaaccttgaagttttgtgcttgtccaaagagggaaagggaggctccagggggtggaggatgaaactgcctgcttgacagctggtcccagcagggtggtggcaggaatacagccttcacaggcctctgctgtcccttggagaccttgaaacattcatccagagagaagaatgcagttggatggatgccattaaccccagccttgctgtgacctaatgggcctatgtgcctgcaggccttgaggggctggatgataaatgagtcccaggcatctttctgagccaggacagagccattaagtggtccacaggaacctccaatacttggcttctcacaggcactcacaattaagtcccagggggtctggagtttagcatcattagcgaacacttggccggtctgatcaaaactgatacagggctgtcaccagttcagagagcctctgtgatcttgcaagccactcagctcctggggccttatgtagcctctaggactttctttaatcaatcctttctctctagctctggaaggggccctacaccggtcttccacccagcctgacaactcctctgatagtgactatgacctgcaagtggctcagagactataaaaggtgagcctgcccctgcttggcacccaggacctgcacccagccctgagggtccagcctctccactgtccataatggatagtggctcctagcatcttgcttcatgtaaaggggaagacttagccaggtctgtcaccccagaacttaagaggcaaagtcacaaatccaaggtgaacctagtctacatagctagttccaggccagccagaaatacatagcaagtccctgtcacaaaaaacaaacaacctcaccccaccccacaacttagatgatggagccacctaggcaaactggagaaaaaccattaatcctaaagccatcctataaagttccatcatgaaaagccagtggaaaagatacccgagagagctggcgtgagagctgccggtacaacagtggcttacatgcaggaggccctgagttaaacttcctaaatccatattaaaaaaaaaaaaaacaaaaaacaaaaacccaaaaccaactgggtatcgtgggatgcactttgtaatcccagccatggggtgatgggaggcagagacaaacagcccctgtaagtttgctggccagctagcttagtctttgtggcaaaggtcccggccaatggcagatcttgtctccaacagaaagtagaaggtgcctccagaatgacacctctagctgtcctctgagctctctgtgtgtgtgtgtgcacacatactcccataacacacacacacacacaaagaccccttagggcttcagacccactatgcctctagaagggagaacttcctgatacaggacagcagcttccccaaactgagcccaaagcaaggatacatcccccctgtcactggttccccttcacagtgccagtgacactgtttatgctctaacatgtgtcattttacctcacagaacatggaaccagcaacaaaaggccaagtagctccctctgtcctaaggaagcatttaccacttggagtgccgcccctattttctcctcagccagaactcagacagaggccaaggtcccttcagaaaagatcctgggccctgcagtggcaggccagctcctatatcccctagggccatgacagcttggctgcctcctccaagagccaacactcgacagaccctagacccaccaacccttccaagtagagactgcagtatccagaggggttccccaccctttggggagcagtgaccagcggggtcggctttctccttggactctgatgccacgaaagaatgacgaggccgtgcacacccgcatgggagtttacttctcaagtatatttttaatatattctttgtaaatagtgttttcttctagttcccaagaacttgagtactgcagtctgttgtgtccagggccccaccctccggatccctctgatgagagacctattgagtcctgtgtagccagcatagtcacaagctgcacacctgagccaaagataggctcatttttcctgccttccaccttctacagccctcatccaaagacaccttcccctccagagcgcaaggtttgctggctagcaaggtcactggcaccctgccgccaacagagccccgcataaaggggcacccagccaatcctcacccattaggcttttactcctcacaacagttagaaatcctcagctattttcagctaaccttcaaaccaaggagttgcagaacagggctgggtatgttcatagggtttaaaggtttttttaaaaaatttatctcttatgtataccatatgtctgcaggccagaagagggcacaagctctcattacagatggttgtgagccaccatgtgggtgctaggaattgaactcaggacctctggaagagcaagcagtgttcttaacctctgatcccaataaacccaatggatgaacttttttttttttaattacatgagcattggtgctttgcctgcatgtatgcctatgatggtgccagatcctctgaaaatggaattacagacagttgtgagcttccatgtgggtgctaggaattgaacctgggtcctttggaagagcagctaatgctcttaactgctgagtcatttctccaacctgctcctaggttttaaatagttcccttcaactaaaacagtctcctctacaattcagatctgagacaatctggagtctccctgactacaggcaaggggaaggcatctacccaggagccttcaggtctaacccagggataggttgtggccttggtcatgaagccttcaggcatagaggtatcaatggtccatccacagctgccaactctggaaaagcaaagaaaagtcactagatggtggcagggggaccaggaagctagggataccatcattctagaaaagtctgttcagtactgtgtccttcctacaacaccccctgcccacccaggctgcagttctttttaattacgtgtatatgggcaagtctttgtgtggaaatgtaagtgggcagtcacctgatgtgagcactgggaactgaactctggccatttccaagaacagtattcactattaaacactgagtcatctctccagcctgtggcctcagttctaacagtccggtcacaaatctgccactcaaaaacagggttctaccacttacctgctcatacctatcaaaggagctaagagggggttactagaaagaagtggggtccattatctcccagagttgtctttcttgtgagagctcgttagtttgcctaccagtggcttcaaaacttccatggcctactacgcaggaaaatacacacaccaaaaagtttagtgaaaaagaatctctaggaaactgtgagaccagggagatggttcagtcagcaaaacgctcatcatgaaatcatgaggacctgagttcagatccctagcacccacataaaaagcaggcacagcagcgaacacctaggcaggctggcctactcagtcagggagctcaggttcagtgagaggccctatctgtcccaaaaactaaggtggagaatgactgagaacgaatgtcaaccttggctctccacataggaacacacagaactctcaagctatgtgggcctgggtggtgtgtcccaacaagacctacttggtcacacagcccagtaggagcaatatcattccttatggctcttgtcaagttctaggctcagctggaggatctgacccccaggtccccaggccagcactgctccttcactgggaaattcatggcaaacatggccctcagccaccaaggttgccctgctgtgaccttgggggtctccattctacatcacagcccactgggactgaggagggactgactcctggtccctaccttccttcccacttccctgttcctggacaacctctgaaggtccctgtgtacaagctaattctagtgcattctcctcacaggaagccaaaggaaccgaaagccaaacaggcagctcccttagataaccaggtggcaatccctggctcagagctatgacatttccaagctctccccagccagtgaagcagtctctaagccagatctcttccggccccattctttacccagggcctgtcactgttagagcacagcaagaggcctatgtgatgtggtaaatatctcacaggaggtagggagggcggtgacagtgtgctgccaggggagggagggaagagagccagggtgcctcatgcggtgaccagaccactggctggccatgtcctttcttagaaaagctaagccctgccgctaccccaccccccaccccagccgccaccactctggtacaacccaaggcaggtgagatctgcaacttatccccaaagagctgtcagcaccatctggggccctgtcatcttgagcgcccagcccgcctcctgccaggcaactcaagtatagctgggcgtgatgggcagtaaatcgaactgaagctggggactcttgtgtgtcctggggacttgaagcaccacaaaggcatggtgcaggaaccctgaagccctgggattgtgtggatctggggtcctacctccatgggcaacctggtcactgcaccacttccaaagtctccctcctatttaaaactggggctaggagggctaaggagacacataacatagtcccagtgactcttaacacctctgggcatctgctacgggtaatctacctctgtcaccttgccaggaaggaaaggccagctgaggactggtcaggaatctggtctcccacattttcctaggcttcatgataaccaccctgcaacagtgtgtggaggaagctgtggagaatgcagcccagcccacagaaggcttgttggtcccagagcacctgttcagcatccccggtcccttctagcatcctcttcaaccctatttagaagacagatagacctgcagggcagtagtggtgcacgcttttaatcccacttggaaagcagaggcagacagatctcagtgagttccaggacagccaggcagacgccagcctggtccacagagtaagttccagaacagccaggagtgttacacagagggagggagggagggtgaggagggagggaggaagggagaaagggagggagggagggagggagggagggaagttaggaaggaaggaaggaaggaaggaaggaaggaaggaaggaaggaaggaaggaaggaaggaaggaaatggtagaccatagccagactgcgtgacaggaacacttacctcccaacctggactgaggcacaggtgccccctggtggaactgagtggccatgcatgtggcctaggacaaagaaaacattctggtcttcaagagaaggaaaaccagagaagaaaatcctagaaagagccaagaagtggagtgggcaggggaatcaagaagtggccatagatcgaaggtgctcgctctacagactagggctgcagaagtcactgccccacaagcagtcacatctgaactcaaactcatcagcgctgccacacaccagggaactcatcaacgtttattatggcaattacacagacaaacaggcggtcattcatccagttcagcagcagtcgaccacagactccattagtgattcctttttataaataacttaggagaagcaagcagagttgataatgcacccatgggcagtggcctgtgggcagggtggcaccagaagatggggttcctcctgacccccagcaccttggcccaccagaggctgggtacccaggcaggggatgtttcaaggcacatacaacttcctaacacggggtagctccagggtccaccctgagacctgattcacatctggaccagccatactgatacatcgtctgctgcaacccctttggtatagtgtagtcagtcacttttattactaagcaggctttggccccagtgctggggctgcactcacaatccctgccctttacattctggagatgagagagtgtagagaaaccaaccccaatgtagtgatgatgtctgggagcaccgtttggatgttctgtgagggcaggtctgttacctgtcttgcagggacacttggggcaggaaggaattacacaaggatagaggggccgctaacaaatgaaattcaaggcactaaaggaatggagggatgggtgggtgaacctcagaaaaagccagccagaggtggagggccccaggagtgaaagatggctgggaggtaacccgggccctccactccagccaggggctccagagtgacccctaggacatccaaccatacaagtgagacctgtgtttcccttggcattccccagctctctccccatagcagtgctgctgctgtggttctaaccagcacacagaacacacttgcctgacattggcacagcaactaaattatggcttttaggactcaaagtccctgtttttcctgttacttcctttgacccaactgtggtaaatgagagaccatcctcaaacggacagagctgtgtctcttggcatttggctctatatgaaacacgccaagttccaagggagagcctgtctgttgccacaatcactctgcactgattcagatgtcagggagcaagctagctgtgcagagacatgaacacacttgctcatgcaaacactggagagccctgtggctcccaccaggctacctcaggatgtgctgagctggtccctggcagaaggagctcccagaaggacccatgctgcactcactgtctggggcctttagggggcctatgtgtcccaactctgcagggagcatcagccccacttccagtgtcaacctcaaatctcagcagatggaggccagagactatgatgcagatggaaggaagaaggtgacagggaccagggctagtacctaggccaggcaggacctggggggtgaaagccatagggaggggttggcccagaagggtatggaggttgagggggcactggaggctgtggctgtcctgggaagccagggagctgaggttgtgttgggtagggaggtttgctttgtgatgggaggtacggggactgttggggatacccgggagcaggagctaggcttcccactaaggggtaccctggaccagaagtgctagttggggccacaggatagccaggtcggggtggcacactcctctgtggggaccaagagtagcccatagcagccctgggtgctggctgaggtgatgggtaagaaggacccacaggcctactgtaggaggaaggctgggccaccacagggaagggggctggctgcagggctccctgggctgtagggcccacaggcaagcctggggatgggctgtagggcaaagggtagggagtcacaacagagggctgtggaggctgttcttcagtcacagggggtgttgcttggggcgctgggcgtggaggcggtggacgaggtggaggagcatctccagccagctctggcaaaacgcggggccgcctcaccacctcctggagcttctctacacgaactcggcgcaggtgcagcagtgtcctcatggaggaaaaggactctaagaacgtttccaagggcacctcaccctccaggaatttctcagccatggcctagaggacacaaaacctgttgacaacagaggccttccacagccttccgtggcccccattcagagtgactccctcaccagaatgccaactccttaatggtaggactgtcacactgtccccctgcccaacactgtgccagacccctggtctgttcaacagctaggcctttgcaactgacttgattgctggctcctgggctgcacacctgcaagctgcctccatccaaaacacaaagaagtctctgccactgagacatccagagggaggagacagcagagagagacaaggagcagaggcctagcctcagatcctgggtgtcctctgtaccaccatctaaccaagtctgaaagctccctggggcctgctgtcagtcacctattcctgattcagctggagtcctggtatagttatgtcctcttatccatggttccagttactagaggtcctttggtggtccaaaaacattgcatggaaaattctagaaataatctgtagactgggcagtggtggtgcatatctttaatcctagcactcaggaggcagagacaagaaaatctctgtgagtttgaggccagcctggtctacagagtgagttccaagacaggctccaaagctacagagaaatgaggaggaagagaggggaggaggagaaggagaaggaaggaaggaaggaaggaaggaaggaaggaaggaaggaaggaaggaaggaaggggaggaggagaaggaggaggaggaggagaaggagaagaagaagaagaagaagaagaagaagaagaagaagaagaagaagaagaagaagaagaagaagaagaagaagaagaagaaatctgtaagctttaagtagcttttattataaaatactgtcttaactgttctagtattagttactgttcatatgtatgtatgtttgcatgtgtggctacacatgtgtatgggtgaacacgcacatttgtgcatgtggtggcaagaggccaacatcaggtatcattcctcaggatctgtccacctcatttcttgagacagggtctccactataggcgcatcaattcagtcaggctgcctgccactgagccccagggacctgcctgtctcccaccccagcactgggaaggcaagcgtgtactgcccagcctggcttcttacatgggtatggaggctcacactcaggttgccatgcttgtgcagcaagcacttcatcaaccaggctatctcgccagtctgtgtttactgttctgaatctctcactgagcctgcttcataaactacacattatcacagacacatatgcacaggaaaaacagtactgtctattcaaagtgagtgttagttgtggtttcaagtgctcagcccgggtcttagaacatgtccctgtcctggactataactaaagtgctccactggtactccacctatcctagctatgctccaaacctctgtgctttgtggttcctggcccaccatgaccgggctccaaggacaaccaccctattcacgggaggatggtaccaccccccacctcacctcagactcttcctcaatcttcatgccttcgatctgcagaaggtccaacaaggtcccaggctgcagcgctgaggaaaatttctctggaacaaagggcaaagaggtagaaatttcagaagcactgctttagttaaatctgaggaccccaatttcaggaaaggcataaggcatgccctctgtgtgcttggggctcagccaccccagggcccaccatagagtccctgcaggtggctctgtgggcacttagggctcagccaccccagggcccatcgtagagctcctacagctggttctgtggaggtccttatgattcctgtaagcatttgctgtcgtgagtaaagaggagcttgaggacagagcccaggtcttggccaagtagctccctgtaggcacaaccacacaggaggccctcctacctccacaaggcctagaccagttctgcaaggcttggggctaaaatggctaagttggcaaaggcagtcaaagacacagctgcctgcattcagatcttaattccaggactagagagatgctctgctgttaaaagctgttaaaggctaggcttgcaaatcccaactccacccagctctagaggcatggcctcaggcaagcccttgaatctctccatgccttgttttcctcatctataaagagagaagatttgggccatttttaaaatacacacacatacacacacacacacacacacacacacacacacacacacacacacacacttacttcaccaaggtatacaataaaatataaatattcaaaaatttggactaaccacagtacctacatctttccacactgttgtgcaaaaacatgccaagcactttgcccagagtctggagcacgtgggctacagtggtgctggccctttccttcctgggcatctatgcttccatgctatttcagctgccaccctgtccttccttgaacagtaaccctgggtcagtcagcaggggagatgccccgagggcatgtccacagtcagctgttcctacccagcttggctttctgttcctggcaccgttccacaagcttccgcagctcctggtatttgtctgaaaggtttgagcggctgatttccaggggaccctggaactccaagttctgctctgccaggctccggttggtggctagtgccatctctcgttctaactgcaggtcctgaacctaaggaaagcaggacaattgacaataagtataactgtcattggtcacactttggcacaggggagggtctggattcagtgttcacctgggcatacccagcttggtactcagccctcaaccacagccacaggagcctgggtttaaactccacacattgtaacccaggagcctcacaacatcctgatcaagggagcctgtgaggctgacacacaggaaacaggcaccaagactaagcatccacccaaggcctcccaatggacaagcacctgcagggttctgtgctgtgcaggacacaggtaagggagaagatccactcctgacggggggatgggatccaagtcccagtcattggtccccacgaagctcacttcttcacatgtgaacacacatgctatgcatacatgcacacagagaggctgctagggagaactcaggtggctcaggccagaccacaagctagaaatgccatgtggttccacaggtactggggagagggttggagcagggccctggggcagtccttgcaagactctggggcaggacagacatccctgcctcccaggccgcacatgatctacaaagctacagatactctctgaatgtcttctgctgaaaatgcttccctggccagcatcactggggctctacttaactgccaggcagggagaagccttggaaccttgcccagcaggcctaacatagggaaggtatctgcttcactcccaggagagctggagaccatcccatcacaataccaggtgccaccagcagagggggctcggtactagtcacagaaatcaaggaagcaagaccagcttccataggggaacaaacaaccttggccagcaaggcacaccaggccagatgggcttagtctgaaacagccacaggaagccaggcagcatcctggataaggggtttccagaaacgccctgattaaccactggacaagctcactggccttggagcaggcaaactggtgagtttgaatgttagccaagagggttggaggatggctcagtagttgagaacacatactgctcatctagagggcctgagtttggttcccaggacccatgtcaagtggctcctaccacctgccacttcagcaccaggggatccaatggacccttctggcctccaaaggcactgcaccaaacatgcacaaatctacatacacacatctatacacataacaaaaaatatattgtttaaaagaaaaacactgggacacttgcttacttgtgtggtcggttgagagtggggcctgcccttcctgggccacatacccttgggcattcttacatccatggctttcccctgccatgccaccctctctaaagcttaactactttaagtttccacttctccctacgaggccagccaaggtctacagctcccggagctcagggtgacgccccacactcactctcttctgcacagaggcgcatcccatcacctttctctgctgcctgcctgctcttctggctgccccacggtgacacaattactaccttactgccaggcgaacgctttctgaaaatctaagtagcttgccctgctttgcttctgtctgtcccacagtgaggatttgccccctcagagaattcaactcaattcttcagacatggctacaccactaagttcaatctgccctttggtcaggagaacgcatcccttacatttccaggagcccatgcttccccaaagggcgaagacttgttcaacttggaagtagtgaaggagaacggagttcagacttgctattgctgaactccactgccttcaggaatgagcctggggtttcccttaacattctgactgaagaaactcttggggccaacaagatggtttggtaggtaaaggtacttcctagtaagcctgactgacctgagtttgagcccttggctcccaatggtgggagagaaccaactcctgaaagttgtcctttgatccccacacttgtgatgtggcatgcatgcacacgtatgtgtgtgcacagaaacaggacaaaataaagagacccttggaattggatggccaagcatccctaatgcagcaacccaaaatctaagatgcagaccttttcaatgacactcttgtgttctggatttcagagtgtctcggatttcacatttttggattagggatacctaactagtgaatctacacaaacatttcaaaatccaaggaatctgaaatctgaaatcctctcatctcaagcatttgaggtaagggacactcagcctatatgtgacagatgaatatggcagctaagacaaagctctgtctgagctcatagcctaatcaaccgtaagagtcagcctcactgcctaaaaagacctttgctcccaggcaactgaaacagggtcattcctgcctcaggactgcaagatgagacacacaaagacctgtcctattccctgccaaccaggagttctttctaacccaaccctgggtcatctctaatctagcagagaggcctgaacagggtgggggagcaggtggcagcagacagcacagcagaggtgggaacagggccaggtagcgtgtgcatctatgggacaggggaagggctcctgagaggctgatggggatgctagttgggcaacttcttgttcattaacacagtgaactcataggacacgtgccgcatctgctcaccagggaaaagaaaggcacatgtgagtgccaatcagaggagcccagaattatctgtgctccttttcctccctcaaacagaggcagcgcttccaggccaatgactagttgcagccactctggggatacctgtggacatttctggctgggtggtcacaaccagtcacctgacctccatctcacaggaaggtcacaggagatggtgacagggagggccaagtcaagctctgtagagacagcagggtgatgcttactcctgtgagggccctgtgactaggagctgagagatggggggatggctgcaatgggaaacagcataaaacaggagtgagtgataccctagccaaggataatctcttcaagtccaagagtcatatgaggacacaggatcccacaggccaaaggggaaaaatgggtaccccctcctcagtgtcagggagctgcctctagactcaggctggaacagtgtgaagactcctgggccatctgggtccctgactgtcttagtccaaggtgggggcccctgcattgcctatcattccctgggctcccagaggatccaggacctggactgcctatcactccctgggctcccaggggatccaggacttggcctgaaacctcagggctcctctaatgaggtgagccaaggtgaaattcacagaacagaaaggtgaatcctggcctaagctcctattaagcatccttcagaagcatgttagggtaggtgggatgtctcggtgggtaatcacacacacacacacactaaatgtaatgaaattttaaaaagaccttaagtggggctggctaaacggctcagcagttaaaagcattgactacccttgcagaggacctgggttcagttcctagaacccacatggcagctcatagtaactccagttccaggggatccaacatcttcagatggcctctatgggtgcctgcatacacctggtgcacatatatacatcaggcacacacaaatagacataatttatttataagtaaataaatttgctgaagacattaagtgaccaattacttttaaaaaccaaaaaagaggaagaggaggagaaagaggaaggagaggaggaggaggaagaggaaggaagaacagcaacagcagcatttgccagcctctctttacctcaggagactccagggccagccgggcaatggcttccgggtcattctgcatttcctccagctcctgcagggtcttgtctttcagcccctccatcttcccctgcaaacaaaaagcgatacccagtttgagggcaagtcaccaggagtcactctacaggaggcgcccaaggaggtgtgagggtccctgtgaccaaactcctggagtccgggccatttctccccagcaaaccatgagacagatggacatctgtgcaagctacttggcagtcaaagcactggatggtatggtactagcaggaaaaggcaggagaggggccaggcaagagaggggacacagaatttggcccaggccttggtataggactacttttgtctgggccttacgtaaacaccccttcacccatccccctactaaagggctttgcagtcctcaacacaggcccaactatgtccctgcttgctatatttagtgttctagcaacctcaggtctccttaagttttctgcaactgcaactgcagccctctccatgtgtcacaaaagccaactgtcatatctatgtcctcactgggggagggggggtcatcaaaccaccttcacgggcagtcatggagagaaagcaactgacgcagacaggaggttgctgacagagctgggttcagtagtcctcccttgtcactgtcccaaagactgaccatctgtcatctgtgtgacaagtcacagcctggcctgagggaaagtccaggggcagcctgggggacacaaacacaccaggaattccctttctttctgctgacaggaacctccatacttacattttctcatcctgcctatatatgggttttagagcattcgtgttgagtgctctcattataaaggttgccatttccagaaaattctagctctgaggagatcaagggccctctcccctccttttttagagcttgtctggaggccatgctgatgactcagccaagaaggcatttggaaattaagagccaaggtagcagacacccttctctggacctcagtttcccctctgtgttgaagggaattgcacccctaagtgaggagagaaagtaataagcaatgatgacaagctccctttgtcaaaggtcctcatcctggtttaggccggacctgtctcctttcatgttcctagtgtcctggtttaaagaacaaataacatggtcaggccgctattaaagagctacttaagtggggcaacaccattagccatcatctcctgagggctccacattgcccagcctctaaataaagcatggaaattcatcatgcatgcctcagcaccagtaagctggggcagagtccagaagcccacagtcagtcctggggacatggatgctacgggtctaagaaaggctaactccacactaattacatcatgcaggaggcaacagattctgagtatctacagtgtgacccaccctgtttcgcccgggcacttggatcccagaacccatccaaatacaggttcagcatggctgctggcctgtgctctgaagataacagtcagggatttaggagccggctggctagccagactagccctagtgccaagctctgggtttaacagagagaccctgccacaatgaatgaggtagagagaaaagaaggtaaaggaggactttcagcatcaaccttagaactacacccacgcacgcacgcacacacatgtatgagcacgcataccacatgcacacacaaacacctaggagaggaaaaagggaaattcttacagacaaattcttcataacaaacagacacaaaggaagggaaccaaaattccattctgaactgtgtgtataactcatactatgacccaaaaccctgggtctagaagccagaacagaggaacagtggccctgggttggaccatagctctgaggaaaaataatattgttccaccaaaacccaagtgtgcctgtgggaaaaaggaacagtgttttaaagattctgaaactcactagatatggtggcacataatcccagcacttagaagacagacatcaggagttcaagaccaccctgactgtatgagctctgtctcaaaaaaaaaaaaaaatcacaacagggctgaggatgtagctcagtttgtagagtacctgtcgaggaggcacacacccttggttccatccctaacacagtataaaaccaggcatggtgatacacacatctgaaatcccagtagtccagagagatagaaaccagagaatcaggagttcaaggtcaacatgggctccatagtgagttcaagtccagtctcaaaaatataaaagacttgaatctacccagacacatggaatattcatttagtaacacagacctagcacaagaccagtttttccacttgtcagctatgttctcacccaagtggaagctcctagagcatcaggttcttcatctgtaaaatggaccaaatgacaggctcagtgataccatgcacaagatcaatgttgagcacaagaacaaatgcttgctaaagatttcaacaccatacaaattattcagggacagatagcctccagtgtggctcagacaagaacttgctgggccacagtgactgcacttagcacagccccacccaccaagcccagtgtctgctgctcttgcattcagggccaagtgtaatggacattgggggcccaggatgcggttggctaaccacacacagacagctggacagtggtgccacctgtagcaaccccagaagtgccaggacctctccccacagagtggtccattcagcagagccctgagcagagctgagcattcctgggccaatcttctgatgttttcctttggcacacttgctctgctccaggagtgtgacaaagaccaaacccaaaatggagagagatcacaagcccacaaaagcagtgcactgcttaccccgtggctgctgttcctgtctcttggtcagaggtggctctccctggtgcagcaggctaagactgctctgtgagaatcctcacagcatcaccactggatgttacaggggctggtctctcacaagtcagatagtacctgcttttcagagccacccagagagcctgagagcaacaagcacttgttcagggccaccatttgggaaagataagaaggggaaactgctggaggcccacagagcaactatctagaactgtggccttgaggcctgggcctctgctgctagcaacatctaactaccaccagctagccagcatggcagacagattctcagagtgaccaaaaccaccaggggtgtcacaggggagggaagcagggctggtgaaacattattagggaacaagcccttgggcttttgtttctagagagctggcaagtccaattccctcaggccttggtgccagggctctgacaccgactttccctcccatgaccactatggcactgagatgccgggtgattccctgcagacagcgcagtggatagctgggggaggggaagtgggggcgatgtgagaatgggtaaggccctgggcattcatctttgtcttcccagttcctggcacagacctgctcacaggcaattcagaaagagcctaggaagggcggaggttccaagaaagggaaacatcgggtcagccagatggtggacaagttcaacaaggtgcagaggcagaacagccatccccccacttactcgagccttccttcatgtctgcacccctttttggaataggcattagtaagcaattactatatgcaagacccatgctgtcccacaccacagcagaagcaagtacataaacatgctggattttatgagcctggcccagcagatacactaaaaaacaaaacacctttcttcttcctctcatggaactcagtttgtccctaaaatgcctttttaaaagcccgtaagtcattatgagcaaaaacacaggtgaagaagaagtatgaggtgtgggtcagtgaagcaaggagggacagcttcgagcagcaaaggccaaagaggtgcccatgctgggaggtcctgtgggggccactggggatcctacagtggagagctggtggctggggaggcagctacacagcagtcacaggtacagtaagataacaggtcttatggaggtgacaatgacacttcagaggtgatcagagcaccagtgaggagggaaaagaacaaggcaggctgcccgtcttcacagtaggggggaaatggatgtctgttgtctgtgctagaagggaaagggcttgattttgctttccctcacccccagcctatcccctgccttttcctttcctttttttgtattttttaaccttcactagaggtcacaactacagtcatgtgtgaagaccagatctacaagtcccaggccaagcatggaaagaaagggtgatggctgtgccaggccttccagctccccaggaaagctacaaggcccaatctagaagcatggccgcatttggagtgggccacaaaacccagtgggctgtggtctgtaaccaaaaattaacactatgccctttggtgtacacacacacacacacacacacacacacacacacacacacacacacacacacgggaatgacagatcacagaaaagtggaacaatgtgaaagcagggggacaaaaagaggaagacccaaaccatgtcacatgctctggtgctctgagtatgggatgggaacagagagtgaagaatttgagatccaggaggctgcatttcctagtggccttggcctttatagtctactgttggccaccggccctgttgctggtttcaccttgttttcatgacttcctatcttgacaaaaccactccacatgctgtgaacaacagtaacacagtatgacccagatagtaaagacataagccagattagaaccagtggatttaggccaacttgggtgttatttgtggccacatcccagcagaggcagctgaagaactgcccagggagaaggctcaggagtgctgggtaggcccaatagatatgttcccaacagcaacaacacacaacacctgtgaccctcactccacaagctctgctatgcctgctcagcgcaaaaacacagctgcaagcaacccgaggccctttcctgaacaaactgaaggaagggaaccaaaatggacatgtagaccatgctgcttcaattccaccagtctttactatgtgagctccatcaaggccctgaacctcaggttccctagctgagaaacgggcagagacatattaacccccttgggctcactcactctgcctcttagaagtactacaatggttgatggggaactactgaaagcctgagatgctggagaagcaacactgccatcactgaatcctaactcattcctgtgatgaggctctgcgggctcggcttccatccctcccctcaccacagccagccaacattgcctgccagcctgatatcacactgcaaggagagctgacgctcctcaaccaacagcaagggaagaagttgctaccatagcaacctacaaagtgcatgttacagggaactagacctgtcctaccactaatagcaaagacgccgtgttgctttggaaaccttcctaaccctgcagtcaaatacagaaacattggccgactgctctacttctttttcctagaatgactcgtcctggacccacgtatggaagtcctagcctcccagggacagagtggaatggatcttccctgtgatttgcaaagatggactacaagccacagaagggagaccctgtggggcttaggttatcactgccgttttcctaccatgctggggatgtaagacctcacggcaattaggtgtgttagttgtgtcactgctgagataaaatagctgacaaaagcaacttaaggaaggaaggattgctggctcgcattccaggggatatggtcccttgtgggtggggaaggtacggtggcattctcactaaggacacagggatggcaccacccatttttagggtgcgtctccccagctcaattaacccagtctaggtaatccctcacaggcgatcccagaaatgtgtttctgtgtcgattctaaatgccatcaggacaaaactcaaaatgaatcatgagttgggaaagagctttagcactgagcagcatccccaacccaatcttggttctttattttttaaactttattgttagtgtgtgagagtgggggaagggccagaggacaacttcgtgagctggttctctcctttcacttccccgagtgttccagggatcaaactgaggtcaccaggcctgtgcagcaaatgtttttggctttgttttggttttgtttttttgttttgttttgttttgtttttttaccttcaggaccactttgcctcctaagagacccgagctttatagcacagcacatctagacttaactcagctggagctttcctggtgacctccacagcctttctcatccagcttctcatctgatgccgtcatcaaggggatgggaggacttagtgagaatgaaaccattctcaaggtgctcggcagacactgggtcatgatgacttcaacacacaaccctttcatacctatgggtacaaaccctgccaggcctccagctggcacatcggagcagaggaaccagatgtggctttatccaacaggcttccacatcaatgtgaaccgaagtccacaaatacaagtctgcaaataaccgcacgtacacacatcaagtgagggaatgcaacccttcaggataaagcttagtgaaagaaactgcttcctctatgtaaatatttacacaatggcccattgttccttagacccactgaaaactccctgctttgcctaaggcagcagccccatataagacattatggaaggggtgagcagttcactatgccaagcatgggggccctcgggaaaggcagatgacctctgataccaaccaggcttgcccactcctggactgtcaccagctggctgggctccccaccaacaaaggcaacctgcagagtctctggccaactccctgcattcctttgatgacccaaccctcactagagagacccctcccaaacctgccggatcctacctgtactcctgacatgcctgactctagcttctctctccctccagccaccatttatttcatcagcttctcaaaatcacccacagtacccgggtaggccacttcaggccagaaataacactcaccttcaatagccaaccatcaagcttcccttaataagtgtccctgagtctctgcagagcaccatccaggcaccgctgccccaccacacatgattttccacctccaaagcctcttcctttccatcatcactcagcccctctgggttaatctttctctaagcctaccgggtccctgtggcttccctggggccagctgtcccttcccattctcttgccagaagcaggaagaaacctggagaccactgtcctaagctcaccccatcttctgacactgacccccaccatcctaagtcccactctgtgtgttctcttaccagtagaacaaagaagcgaccataccagctatccacctatgtcttggttcctctctaggaccgcaggatgtgttcagcagcaaaacaggccaatggcagtctccacagatctcagtaagtgctctctgggtacagtgcaccatccaaggcaatctgtgcccacaaatgaggtgcaaaccatggagtggccttggctctttctttctctgtggaggagaaaacagggctatagtgttctctgtgtcctcccatagcctcacaaggaggaactgtggctcagcatgggcagccaggcaatgagtccacactctcagagcacttcaccattgactgtaaactgtgtctggggacacaactcaataaaggatggttactactgacagatttcagccagcctctgaggagcagggcctgttagattatggtcggaacccaacacagcacaatccttaacaaacagtgtggggcctgctgtcctttaccagcactcaggctaaagtccaaattcctcagcctgggccacagtgccccaaacagggtgccactcaaagctgttcttcccccatatctcagcagacctggcatctggaaggctaacaacctttgcttgctggagagcctggacaggcaatataatctccccatgcctcagtttcttcccttaaagggggcttcagaaagaatgaaataagttagtgcctgaaaggtctaccaccctgctcttatacagtgttcactatggctacactggcacagtgcccagttacagtcacacctctaccctcagcacttcccatgtggactctacaaacaggaacttggattcctccagagacagcatctgtcaacagtgatggagctagatggctggctctgaccagatcaatagcattcatcatcagtcaatagacccaccaagaatcaggtgtctaaataggcagccagtccttcaaacttcctgatagagacactcagccactcggcagggcctcttccttctcttcttcccttaacttgtggctccaagttgaaagaaaatcattctcaatgaccacacacaggcttccagttctttctgccgtgtcctgaccacagtctctgaaggccataaggcagctgtctgtcctcccacccacacctccagactgcagagagctgagcagactgtcaatcatcccttacacaaagatcaagatggaggtcaggcctgggtcctgagctgcctctgttcaaagtccgtaacaatgggactacatctatggctggtgggtgaccattgcaggctgataagacatggggtggctgcagagcctactccggccagtgccaagtccagccacatgaacttttaggatgagcagagtcataaggaggcagatgggtccactgagggtaacaggaaagacacagaaagtgagaaactaagtgagagcttcctcatatccacctctgactctgcaaggactgacgaaggtcattaccaaagctgaaaggtggctgttgccacaaaccagcctctccagagatgacttcctaggttccaaaggactcagccctcttccacatgcccagaaacctcatgagaacactcagagttctcaggccctgctatgaaactcgccatggcttcctagtgtcctgtgctgtgcttccaatctatgctcctttgcttgccacatgatgtctgctgaccctaaacttctctttctggatagttctgagccctccaccacccacgagctgctctgctcaccccaactctccctgcctaaccttctcccagcacagaaatacacttctagtcactcaataaataatgacagtaagaagccagatggttctcggggttctatataaataccaagcagcatttactgttcggaaacaacatgcttgtccactaagaatctaagttctttgtgagtcactcacatttacatcccaaatgcaggtataggcactcaatgagtgcttaagggacatccgtttttaggagcacggaccagatcctaaaacgcatgcacatgcacacacttacaatctcaaagaaccaaaacactagacaaaacaaatgttggccagtttctcaatattggatgtcaggcagcctggaagaatgatgcttagggaaagaagacaaagtgggttctagagttgccccagcaactcctacagtctccaagatggcatagggagttgggaagagggatttaggagtccaggaaagccaacattgccagcattcacagggcagagaaccagggggacaggagttacacaggacaccccagaaatgtgcagaggattcaccccagaaatgtgcagaggattctccagttcccagccagccctgctccagataatcaatactagcatggccactgaaggtgggaaggcctcacgcagccgctgacagcaccacagaaggcattacctcagtagtaggggagcctagctcagctctaaaagttgcctgatcgcagctaacaaagcttagaagtctgctttcgaggctctgttccaaataacaatatacctgcaaacaatccagatgtgtgacaacatatgtgatgtcaaacaaggtaaaactggcatttgacctccaatcagaacgtaccagagaaggactaaaacaagacctgtcacaatcaataaaaaatggacccatttatacaggtgacagaattagcaagcaagggcattaacaaagcaaccatatttcatgttatgtgtgtgtgtgtgtgtgtgtgtgtgtgtgtgtgtgtgtgtgtgtgtgtgtgtgatgtatgtatgtgtaatatatatgtatgtgtaatgtaatcagatttatatttggtatgttcaagaagtacgggttctaaaaggttgagcacaggaaatgcagacttggacagacattttgcaagagccaaacttctacagggataaacaacactgtatgagattaaatgtatatcagactgaacactctgcagatgagattctgcaggggaaaaaaaattagacaaacagaaactatttgaaacaagccatgaagaggaaatgatgggagaaaaagaacaggaaagctggggtatgactataagcattcccagagaagaagggagatggacgggatgacggtttgaacaattaatgactgaaaatgaaagctataaccacagatgcaaaaaatgcaatgaatcccaaaatgagaaacatgaagaaaattacactaaacacaatacagttaaattgctggatgaggaagcaacctagtggtagagtacttgcctcgtgtgtgtgaagcccaaggttcaaagcctggtacctcagaacatccacataatatatgaaaagtaaactgtttaagccaagtgacaaccgtttaagctagaggtggggaaagaaacatcctaaacagagaatggaaggaagactgtcagcagacagcatccatgaaacaatgcaaacagcagacacgagaagagactctttaaagaactgacaaaggccagtttagaactcaaggcctgggaaaaacaaaggcttctttagccatgcaatgtgatgatattttgtttatgatctaacaaataaagatccgagtgcaaagccacactagttagtcatagaggtggccacacctttaattccagcactcaggagacagaggcagatggatctctgtgaattcagggccacccagggctacataagagtgaatcagtctaaaagagaaatagcgctcacacctttgatgccagcacttggaatgacacccctttagtcccagcactagggaggtggagacaggagtgatatggctgggcagagagaggaatctaaggtgggaggagacgagagagatgcaatccgtgttgagcctgaggtttggtggagagcagtgtagtctgaagtttggtggatcaccccttcggtctgagcactggtagaggtgagaactctctagtggctggccgctttgcttttctgatcttcagcaagctttatgtgttatatcataaacaaaatatcaccacaatgcaaaagctgaaagaactcatcaatagacagaacagagtacaaacaatactcaaggaaatccacaaggcagaaggagcatgcaagacagggagacccaaatcagcacacagaggaataaagaacaccccctccccaaaaaaccctcacaatgcaactctgtaaaaagcactgtgggatttgcagcctgaagttgggggaggggggaggggggggacgggggggggggacgggacaggacgggatgggacggggggtgggggggccgcccgacaagattcaaccctgaaggtacacacacacaggacccttgaaacgagctgtgacatatgaaaaatgcatactgctatgcttaaagcaactgctaaaaagaaatgttcctgttataaaccaacacagaaagcaaaagagaagccatgaaaactactcagtggctaagaaagcataaaaacaggagaaaagaataaagaatgcagggcagatgggaaaggaactgcaagattccaccacagcaatgtggactaaacacccaagcaaaaggcaaccctagaggctggaaggatggctcagcggttaaaagcactggctgctcttccagaccacacaggtttggctcccgacacccacatggcagctcacagccatctataactccagtcccagtggatctgacgctctcttctgaccaccatgagcaccaggcaagcaaggaacacagacacacatgcaggcaaacacccacacacataaaataaaatacaatttaaaggcaatgattccaagactgatttttttttaagcaacatccttttgtatggtacctataagaaatccatttccaatataaaaagcttacaagattttaaagctgtgccataagttttaacgtctaattataacactcataaaacctaccattttagccattttaaaacttttattatatttatttataatgtatgtaccgatatgggtgtgtgtatggaggtcagaggataacttgcagaagttggttctctccttccaccaagtagatcctgggaattacactcaggtcattaggcttggaggcaggcacctttgcccactaagccatctcatcagccctgttttagccattttcaagtatacaggttgtttgatgctttgtttttcaagacagggtttctctgtgtaggactggctgtcctggctacaaagaccaggctggcctccaactcagagatccaccttcctctaacacccctccaccaccagtgctgggattaaaggcctgcaccactaccacaacctggcaaagtatacatcctttgacatttagatacatttactttgttgtatctcaagaacttttcatgaccccacacctgcgcccattaaatactgacaccttattcttcttgtccccaccctggcaagtaccaccaatgaatctgactaacctagaaaaaacaaaagccatacagtcagtgtgaaggctcatgcctggaattccagtactctgggaagctgaggcagaaagtttgcagtgaattccaggccagcctgggctaaaacagtgagacctcgtctcaaaaagaaaaaaaaaaaaaaaaaagccaggcggtggcacatgaatctctgagtttgaggccatcctggtcaacagaatgagttccagaatggccagggctacagagagaaaccctgtctcaaaaaagaaagaaagaaaagaaaaaaaaaaaaaaaacataaaacacaacaaaaccaaattttgttcttctctgggctcacattccacacagcgtgctgcctgaacttcatccatgtggcactgctggactctagtactcacctgttcatggactctgtgggcgtggctgtcttttgactctcataaacaacactgctattctcatacacaaatggctactggagttcctgctttcatttcttctgcatagatacagaaacagaactgctgtgtcatacagttacctgacttgttgagggatcactgtgcagcttcccatagtggctgagccacttcacattcccaccaaaaacacgaaagccttcgattttccacatcctcaccaacacttctttccatttttacctagtgtgtgtacgcatgtgcatgggtgtggtgagtgtgatgtacaatcttactagtgtgtacgtgtgtgtgatgtatatagtattattagtgtgtgcatgcatgtgcgtgtgtggtgagtgtaatgtacattcttattagtgtgtatgtgtgagtgtgtataagtgtgatatacattcttattagagtgtgcacatgtgtgtgtgcaagccagaggttgacctaggcctcaatggccctccacctttatttttgagacagggtctcttagtgaacttgaagttcatttggctaggttggctgaccaatgaagtctcctgtctccatctcacccagcacaggcttcagctactatgcccagcctttacatgggttctggggatctggtcctcatgcttgcaatgggaggcattttactgagccaccagccctgctatttcctatttttaatggtcatctagcaagtagtcgagtgttgtgctggattttaatttgcactttccctgatataagcatatctttttagggacttctggtcacttgtccactttctaattgtctgcttttgttactgaggtgcagggttcctctgcagtcttggtcaagtacactaaccctaactaaaacataagacttcgggcatcccagcctttaacaggcaatggccagccttgtccacatagtgtgttccaggacagaatattaatactattttcagaagagagctttgttagaaacaccctttaattcttttccttttaaattatggaagccgtcaggcataagtgtatttgattgacagccatcagacccttcttcccagcagtccccagatgcaattacccagagtggtgcttggacaagtgccctaggctgggcaaggacagaggaggatgggaactgctactgtcaatcttccctggttacccgggtgagatgggggctgtcagaaaggaacaccatggcctcctccacttctccactactgcagtttcaccagggacagctgacttaagcaacacccattttcatgaaaattatacaagctgccaatcaagaggccacttcttcaactctgtaaactgacaatcaagcagtttaaaacccctatggctgccaagactccagtctagctaccatctcctggaggagacccatgccagatccagtcactccacagggacttggttctggacagggggaaccatacaactgtcaaagtcactgccccaacaaaggcttttcttggggaggcttggcttcttgaggcattgggggggggggctgccctccagataatcaagtccatggctactactctgactactctgacctcatcacaagggacctcatagcagcaaatcctcaacccaatcagagagaagctctgccaagacccggacagctagtgagcatgtgggactgactggccagctaagaaaacctgtcctctcctctctagaagcagtgtgggaaatctcactccccttgctgcccctgcctgctgcagcatagaccccaagaatcttccttgcaggagtcttattacacaagagtgcagtgagctgagctgactgcatgaagaacaggtgactcccaggctgccggctcccacagccagcagcagccaggaacagagactgcgacaaagatgaaggactgggaaagtgctgggaaggtgacaaaagtggagagcagattgcaggggaagagtgtggagaacaagaagaatagaaactacaaaaggcacgagacaccgaactgggactgtggaagacccgcgagcctcccctgatgggagagtttaaagaagagccttaactagctagctaggtgctgctgctcagagtggtaacactgagaactgagggtccctgcatcctgggctaagagctgtggctcaagacacttggtgctaggctactttcctaaagctgtaatactcagaatgaagggtacaaggcaccccaagctcagagcagctgacccaaagggagccagctaagcttggcccactctcaattcccatctgatcaaagcaaaagaatcctcagcctcccagaagtcgggaggtagaggcaggaggatctctgtgagttcaagactagcctagtctacagaacgagttccaggacaggctccaaaacagtacagagaaaccctgtctcaaaaaacaaaaaacaaaacaaaacaaaacaaaaagaaccctcagcctcaacagactttggtgacaccctctctcagtaaggcccagaagagaagcagccttcactaccaacagactggactggaccaccgaacactccacataacagcagaaccaacttttttctcaagtccccctagaacatttaccaagctacaccatattctggggtacaacaggggtcatcaaaaatttaaaataattcaaattaaggcctggctcagttggtagcgtgcctattcagtacacaggaagccctgggtgtgatcgcatgcatcacctaaatccagtgtggtgggacatgcatgtaatctcagcactggggaaatggaagcaggcaggtgagaagtccaaggtccctctgctatatagcaagtcaaaaccaatttgggctacatgagacccagcctaaaaataataaaaggaaaaggaatcatgatggtttgtcaactagacaggagctctaggagatcacctaggagacttgcccgtgagcatgcctgtgagggattatctagatttccttagctgggataggtattcctacctcaactgtgggcagcattgttagctgaggtccgggactgaataaaaagaggaaaaatgagcagagcagcagcggcctggtgagccacctcaagctcctgccaccaatatgtcctacaacaacagtatgtgccctgaactccaaaatgaaataaaccccttctcctttcaattgcttgtgtccaggtattttatcacagcaacaagaaagcacccagcacaggaagtctccgttcagagagatgttaaacgagaagctgctgtttgtggggcataaggcagcagcacaaccctaggctgctgtggaacctgctgagacacctcgatgagggagttagcattcaaatgcgcaggcctaccctgctgaagttacctgtcttgaagttcatggtggagatctcccttccccagcccatcctaaagccccaaggcctgacttgtcaggcccagctcaatcaaggcaaacctatttgataattccccatcttccagacagctaggaaaagcagatagagaggagagaatggagggagggacatgtggatcatgtctccaaaacctgctcaacctaaagactgtggccatccctgaaatctgtgtcaccaggcaagctgggcggggacaggctagaaccttctggaaactccagatcccaagaggaaacttctaacacaatttccccacaatagcaatataattgcactaatacaggtcttcaatgacctcattggtcagtctggaaaaaccccactactactagccaacagtgtccaggaatgattcatgtggctatttatctcaaagcccttttaatggcacattagcatatgtcaaagaaataagcaaaagggcaccaagaatctggagtaatcatctcacttccaagctccagtggtctggcaaacctacaaatttgcattaagatcagaatcgcccagtgtgtgtgtgtgtgtgtgtgtgtgtgtgtgtgtgtgtgtgtgttaaaaacagactcatggggtcccctccaaataacatcataagactttccagaaatggggaatctacattttcaaaaagaattatcacagataattcttaagttccaacacattagggaaactgaggcatctggaaggcagtattaagagttgaaggcacatctgcattgaaaagagacaagagggttaaaatcctaactcagccagccactcactagttgacactcacctaacatctcaacaactccgtaaactgggatcatcagtcactcagaggtgtactctgtgtccaatatgttcaaaacactcccaaggacagcacccagcaagggcagccatgcaagcagtcagaactacttcttggcaaaacagcaacagaaactgctcccactgaagcagcgcatcgtggtttctacttaatggaaattacaaaggcagtaggccagatttccaagataatcttaggaaaaaaggcttttctgggcaccatgacggcaaagaacaaagactcatttcagagttcagtatttcacccagcagcccagatcaggtccctccctgggccccaaccaaataagagtctttcctttctaagtccctctggcaccaccatctccagctgtagggctgacagttactgaatgtggagtgccacattttgagtggactcctggataagaggcaggagcaccgaaggagacctggaactctgtgaggctctgcggctcaaggtgggcaatcccagttatgagttacaaggcataggctagattcaagagctgtgaccctgatgtgcagtcaactctaccactaactcaaacacatccttggggagcacattcccacacccaaaaagtggaagaacacccctaacaggatgtctggggtggggtggggtggggggacgtcaaaggagaaccaagcacttgctggcaccatacatcgctgtcttttgcacagggaaggcccaggaataaggacggctcggccatccttattggggttcagaagaaatggaagaacagaaccccaacctggataagacccaggccagcaaatcaaaggccagagtccctccagccttactacgccgctgaggcaagtcagaccacacaggcctcagtttccccatccgtacaaagggtaaagaggcccttaatgacacactgaccacaaagatgctcgggtgaagggctgcgtggcgttagcggataggtgggagggggaggagctgaggcgaccagcgaggacagcctcccaccctccatccctcccaccgcgctgcaggggcgcaggcccgcagggagtcacgcgcccattgcgcccaatcgcaggcctcggccaggcaggcggcgggcggaggggcctctgagctcgccggcaacgcctccaccaccgtccgccgctgcccgccgctgcccgccgccgcccgggaccctccccagcggcgctcacctgccggggccgccgccaccgcaggcaatcagccgccgcccgcacttccgggatccgcgagccccgcctccgccggatgtgactccctcccgagtccgcgccgggagctggccgcgctgccactccgccgtgcctcgggcgtcccgcctcgtgggtctcggggcggccacgataccggcactcatacgctggcggcagccgggaaccacacccgcggagggccactcggccccgcccgcgcgggaaggccccgcccccgcctgcggactccgcccatggcgagcgcgcctgcgcacacttgcaggcgtgtctttgagacagcctggaggggcctgagtgagcaatcttggaatctccaaagggaggcccaggtgtcctagtcggaatgcggtgcccctggcctgccccacacactcattgtcttagtttggccgcaggactagaatgactgcggtcccgaatatccccatcagactctgagtcgttttcctaaaagtcactctttgtcaggatcctagattgcactttagtcctctgtggatggttaactctgtataagcatggatctgattcagcctcactctccctcccagagtgaaaagccccaagaaggcatgggaacagaccaggcatgaaaggtgaatgccattccccattgccccctgggcagtcgtggttatggggaccctgggagataagcttccagcctaagaaaaccatgccacctggaataccacgctttgtcacacgttagacatttgttgctggtagcagagaccagcacaaactggcgtttgcaaaatgggaattgctgggtcatacaaaagggaaaagtccagaggcaccagtgacaacagcctcctgctccttcacttgaatcttagttctgtacacacaaaacagctctcatctcaaagggaatgaaagacattttgatctgagccaagttaagagtgaccatggtgcgggacacagtcaggttgccttaaataacgtgttccaaagtggaagtgctttcatgaagtttgtaagtaacaacaaaagtaagtcatacatcaaggcattttccaaacgccgttctagctctaagataatcattgttcccactggacagaacatcctccctttactgctccatgggctgcctggtcgtgtaatccaccttcatcaatcagatttttttgttttgagacagggttccccaaggtctcaagtagcctatgctgtcctagaactctcaaagtcgccaagagtgacctcctgcctctacctgccaaatacaggcacatgctgccatgccagggcctcatacatgctaggcaagcactctaccacccagcccaaggctggagcacagttactgcagaaggaatcagcacagaagacagtcagctacctaagtgaggtgtcacccactcatgggtgctagccaacttgatagggactcaatgcaaatgtctcattttgcaaaacatcagagtgaggactattaacagcaccttccagaagaaaaccaggttgacactgtttctccagggtcagaaggaccagttgcagggagggggcaggtgatcttgtctgtttttgtcatttcttacgctgtgtgaattttttatttttattttttttagctgtcaagcagagactccatgcaggtgctggaaagtgctaaagctaaaccccaaaccaccagaacctaagaactgaactgaagtatggggggggggtgagacacgaacagctgtatcctctctgcaagtactgcccccgtgccaagccatggtggggggaacctttttagtaaccagacttggagcgtggtgggaaggagaactggtggcagaaaatggtcttctgtgagaggattattagaaagatgcctcaacttggcttcatagaatcccaaagcagccccaggactagttggaggtcaggagacctctggatccacaggctaggcctgaaggccacaaagccatcctttcaactctgcagctgaaagttgcagtcccagctcctactagcctagacctcacagctgagttccaagtcccagttcatgctatgccactaaaccaccctaaccttggccaagtcccttctgctctctggtgctctataccctatgtgtaatgccaaagacagacccagaacccattctctttcaagatactccatgatggggctggagagatggctcagcagttaagagtgcatttctcttgcagggaatccaagcttggttcccagtatccaggtcaggaagcttacaatctccagctccagggaatctgatgccatcttctgtcctctgcaggcacctgcactcacctgcatgcacacaattaaaactagtaaaaataaaatatttcaaagaaaggaaccacaattaggggaggaggacttgggtggaatttccaccataacaagggggatttgtaatggcaagggcctgtgataaccaagctcagtaaatggctgcttgaccatctgtagtcttcccttggtgggtgaacacaaactatcactcaggggacctctatacctcattacccaccatgacataatttcattcatacttgatttcttggctcagagtgatcaaggtagagtagtcacggctgtcaacaaaaccaagtttactctgggcacaggccacatggataggctagctatcttcagtagcacagaagacggcagtcacatctacctgtaacaatggctctgccttcttggtttgcttttgtctgccctctccagttttcctggaaggctcacccagccctgatagggccagagagaaagtaaatactcttgtctaatcttccttgttgtgaccatgtggcatccactgatggccccacccttcacaggtcctgcttcctgcattccgtctcagaagatggacaggaactcagcatcggcacctgtcccaaggcctatgtctggcagtcattgggatggagaagttcctggccttttccaatggtctgtcctgtttcccagccagatccctgtaacaaggtccttgggaagcatgcatggttttcttccctctccagggcactcaaaactccaaggatgctcttgagctgcagaggcaagaagtcctggattgcagcctcatctgagctgctcaactcaaccatgggttcccccaaagaaagactaaagtgtgtttccgaccctgtgacatgatgtcatttcaaagttcacacctaagaactgtgcagttgagtgataacaacacaatcacacacaaactaagtctcatgatattttgagtaagttcacagttttgtgttgagctggatgcaatcttagctatcccagagcatgtacagaccacagggtagacatagctagtagggtatcctgttccagctggcaaagtccaagtagaaggtgcttgtgaccttatgagccagtgccatgctaatacaggagaggaggaaatgctgtgggctgccaagatgggcatgatccagcacctgagggcttcctgctgtcagtcaagctgcagctgcccctttgctccttggctcattgattctctcctgctactccaaggctgtgagtctggtgacatagatgtaaggttggaactgaggaggcaggcaaagaacctcagtgtggggcaactgcaaatccctgagagctgcccataccattgggcatctctgcctccccttctcaaggctctccgcatctgtccctcaccccaccccaccccaggaagagattgatcaagcccagtagccatggattccagtactctcttccttaccttatagatcctgtaagtcacatgttgcaggtctcagtgttccctcttccaaagaaaggagatgggcctgggaaacactggtcactccatccaaatgctaacgtaggacctttggctgaaggggaactatgttgctcagggatcaatggctctatccagaggtcaggagtgctgggatcaactgaggatgtctgcttgtcactcaggatggagaaggctgaccaggtaccacctatccaagtcacaacctacctaccaccaggaaccaaagaacccgtgtgccccctccctgcccatggggcactctgccacttggattctatgaaatgtcatgaagcagaagttaccaatgggaaatctgaggactcttcaatagaaacttgatctgggaaacaagtcacctcccttaaaggatggaaaacaggtagaggactttgggtcccaggcatgccagtgagaggcaggtgaattttaagatgagagatgttctaggtctccagagattttgaggtgacctcaatacctggagtcatcaaagagccaccaaatgcagctgccccctttcctgtcacacagcagtagctattgtctaaggctgcctcatctgcagcaggaattggagcagaaaggaccagatccagtctccagcatccgtgtcccagaagacacacgtgtgacagggcctctcacaggtgctgctgcagtccaaggtctgcttttgactgccagttgatctgtttaatttaagcccttggctcaccctacatatcccactgccctgtgtgaccccttcaccacctctcctaccctgcaaacccctggttcccttacaaggtccctttccctctgatccctcttgtatcccacactaacaactctcctctctgttattcacttatggatcccccaccatttgccctgcataacacgcactgttccagcctggggcctctcactccatatgcaggttggtttcccttaccctataggtggtctcaatgacaagaaagccagagggagaaagagcctaatttgtttcttctcaaaatcaccccatctctcctacttctaagccctgccctaggcttcatcaaagttgcaaactgggttaagaatccctggagtgatggagcaggggacagggaggttccagaggcagtgccaggcagcccaagtttgccctctgggtttatcactgaggacgaggacttcaagatggaaatgttaccaggtatagtgtaaccccagcacttaggagactgaggcaggagaaccattgaaagtctgaggccagcctggcctacatggcatgttccaggccagctaacagcacctaacctcaaacaaaattaaaacacaatccaaaagcaggaaacatttcaacttattacaaaagaatttcaaacctaaaaggcgatcttactggtaaaccatgacaacaggaataaggacactgtccagagtctctgcttacacccttttctttcttttctttctttctttctttctttctttctttcttttcttataaatacacgtgttttgttgggcgacagagggcatagacgttgctgtatagagctggtataggcttggggccaaatgccacaaagatagacagatagacagacagacagacagacacagagactaagtccacccagcagggcagggcaggcaacattctgaggcctgtaacacttggttggtgggcaagagtcatctgggagtctggtccggggctggtggggctccagacactttggaagctccttggtccagtccgattgaggtctagggctgtgtcgcagtggcacctaggctcagcttatgtcattcagggctttgcgggtgaactcaggcagcacaaaggctgcacggtgtatatccaagttatagtatttcagctgcatctgggcctgtgtcagctgctgcaccggctcccggaagttggtgctcaggtttttgctacatagcatgaagccaatctggccgcttggataggtggggatggtgcagcaggcgtggcccaccacagggaacagagacttgcaaaagtgcctcatctccttgatgagatccagatgcagccatgggcgctcaccctgtcagaaaagaatgcggtcttccttgagtgctgtcttcataagatggtaataggactccttgaagaggctctcaacggggcccatagggcctgaggagtcggtgatgatgacatcaaaggcatcttggttctgtttcatgaactcaaagccatcgcccacatggagggttagctaggattacaagtgtataccaccaactttactttgtttagttattcatttgttttgagacaggatcttatacaatcaaagctggcctcaaacttgctttataatcagagctggccttgaactcctggtccaccatgttcactctcccagttgctgatcttcaacagcatgccttgtttctgtggtgccagagtttggatggcagtgagcgccaggcaagtgctctactgactgagccacagccccgggcccaaatgactgtctttaatatcactcagtatccgttctatgtttgagattcccacccagtgttgtccccaggatcagtaaagggccctggaatcctgggggtagagcaatgttattctatgttctacaccatagtacctgtttaaggaggtgaacatgagtatcccaggccaggccaaaggctcccaggggtgtttttctgacaagatgcttaaaaagataacagctgtcgccgggcattggtggcgcacgcctttaatcccagcactcgggaggcagagacaggcggatctctgtgagttcaaggccagcctggtctccagaacaagtgccaggataggctccaaagctacacagagaaaccctgtattgaaaaaccaaaaaaaaaaaaaaaagataatagctgtctatttgtgtgtgtggatatgcaaacaaacctgggtcctatcaggggaattgcaataggtactcatcaagtaggaaatatttatttttttatcttcgatttttcaaggcagagtttctctgtagcttgctttggagcctgtcacagcctctgcctcctgagtgctgagattaaaagtgtgtgccaccaccacccagcaggattttttttttaaagatttgtttattatgtatacagtgttctgcctgcatgtacacctacacaccagaagagggcactggatctcattatagatggttgtgagccaccatgtagttgctgggaattgaactcagaacctctggaagagtagccagtgttcttaacctctgagccatctcttcagtcccaggaattatttttttaagtgattcatttgtctaacttggagattgccacaaattccacagcaaggctcagcccgtagaccagcccacagcaacatgttgaattctctgtgcttctctccagctgaatataagtcaggagtcctatgagccctccttgagtttggatcacttgtctgagtggctcagggattggggaaacacttccattatctgtggttcgttgttcattcctgtgtgtgtgtgtgtatgtgtgtgtgtgtctaggtacccacggaagtcagaagagatattggatcccctggaaatggcgggcttctgagtctgcagtgcacactacactacaggggccttagtcacagaggcctcaacaagaatgttaaaatgtcaccaggtggtggtggcgcacacctttaatcccagcactcaggaggcagaggcagttgtatctctgaatttgaggtcagcttggtctacagagtgagttccaggacagccagggctatacagagaaagcctgtcttgaagaaaacaaagtgacagaacagaaagagtcagagctaaggttgacagattcttcatggtgtccctgccgaaatccttcctgctgtgcatggagcctgcaccgtctgagataaagggtgtcttgtcacctgtttgggtagagggaggtaggagccaggagcagtgtatgaaaaccaaagtacatccatcataatatcccagccactaacatttaaagggcaggaatttcacataaacatccaggctctgacttttcttggaaatgtggccaacctggcaccatggcttccttccagcctggcagtggcaggttagagctgactcaagactgcccccttgtggtaatactatgcagcatcatgcccaacatggccacccagcctagttagtacccactttgcctcctaggtcctgagagcatgcctacattgctccagactgcagactccatgaaggcaaggacggactgcctgcctgtcctcttatgttttgggggaaaattaaactttgtgaaagtctctccttttttgtggatacattttttaatgttacattacttattttatgtgggtgggtgaggacctgtgtgctaccacagtagtgtatggtagtctaagaagagctcgtggaatacagatctatcctcccaccatgcaggtcctggatatccaacttggcttgtcagcctctattcctcccagcagcctgctctctaatgagggcacggggatagtgggacacacctcatggccagctgggaactgcgtgggatctgaagggcagacatggaacctggcacttacttttgcagctttatccaccgtgtctttatcaccaagatagcaagaatcttcccactctgtgaagtttgtggcttggtcttacattctcagccactaaaactccctgtgttctgagaatttttagcccctagggtaaagacgttatcaggaagtttgcatttcttatcaagccccattagtggccctccaggcctgattagcttcgagaaggtaagagctatttaacaagcagttctccacacagcttcaggcccttaagcggggaagggatcatgaagtggcttggggtcctctggcttgtggccctttcagagtgcctggtcaagtaagtatagggtaggtgctatcagctgtctccctggttctttcttacctttgtaaaactgactggccctcttattcccctgcccatcccaattgaagaagaaaatgaaaccttcctggctttcataaagtttaggtgtccgttcatcagtggtagtttgccaagagcaccagaggggcccaaaagtcttggggcaagtcttcgggaccacccaactccaagggcacaagtcacatcatgggctatatggttgtcacttcccggaaccgttcagtgtacaacttgtgtgtctacagaggtgtttcttctacaatgtcatatagatctctctcaacatgtctgtctcttcagagcttccctgtgtcttcccaactcttcaagcgtctctgtccacagacctctacttctttgccattgggctctcattctcaggcctcatcattttccctgctttagctccctggaattttccattttcctctcctccctctcctctgattgaaccgagatgggtgtggagggcttctgccacctgtgtgtggtggtatacacctgtaatctcagctttggggaggtgaaggcaggatgatcagaaatttaaagtcatcctcagttacgtatcaagtttggtgccagcctaggatacggaaagagtcggactcggaaagaaaagaaacataaaacaaaaggggctacttcctaggcctagcttttatggtaaccagcatggtgaccaaggctgagttacaaggaaagggatctgggcgtccattgcctcagtctcccatccttcctttcggactgcttccagaaagacagcaagtacactgcaaagagtgacagcaagagtgacagtgccatttaggacttactaaatggcaggtgctccctatccatcacccccacccccagcgctcggcatgaggagggttttcatcccatcttctctacagaaagggaagctaaagttcagaatggccccatggctttcttgagagtgaacaccagacctggactggaaaccaggcattctgcatggacttcccattgtgttgtgtgggctgttccagtaaaggtcttcttcggaaaacgcacggtgcagctgcctcgttgcctcatggcgccccgtggtgcctctctctggctcaatttccttcccaatgctcatttaaagaatccctctgaagaagattaagtccatgcgagaaaatctgcgggaagacaacatgctgaaggattacctggagaagtaccctggtagcggtgcccgcgtgcttcctgagcagcgctggaggaacccagcagtaacttatgagcccatgaggaactatctagacgtaagtgtgctgggggctggagctccaaagcgccccctagggcttctgcccggcactgtggcccctctggggcatactgcattagggctggggttcctaaagccagaaagggtggagaagtaaggactgggatagcacagcagttaagagcacctgctgaaaagtgtgaggacttcagttcaaatccttaatacccacataaaaatacaagctagatgtagtcacacacacttctgacctcagcgctgtgggagcagaaatagggagtaactggggtttgtggcttgccagtccagctttatgttcagtgagagatcctgtctcaaaagaataatctggccgggtgttggtggtgcatgcctttaatcccagcactcgggaggcaggggcaggcggatctctgtaagttcgagaccagcctggtctacaagagctagttccaggacagcctccaaagccacagagaacccctgtctcgaaaaaccaaaaaaaaaaaaaaataaaaaagaataatctggagagtgacagagcaggacacctagtgtcctctgctggcctctgtttgcacctgcagctgaaatacatcacacactcatgcatgaaagaaaaaattaatgggtgaggaacagggacctgtcccccccctcccccgttattccccatcccctacgccaaggagaacacattcctaccctatctggggctgtgctggctggttggacctagcaatgaccagtcattaccattcagacatcctgttctatgttgatgacaagccattgtgtccctgggcttttgttctttttcacctaggtgaatccctgggccccaagcaagggtgagccacatctaacccaatgccagcaaatccaatcgcacatcaagcttggtatctcagggagaggaatcccacatcttcaaactcagatttcaaccagtgatgagttagtgagtgctgagatgggctggacactggtcggctagcaagatgctgtcatttctgatgagcagagcctaatctctttctttctttgttttgttgttgttattgttgtctgtttgttttgttttgttttgttttgtttttcaagacaggtctcactgtgtaactccagctggcctggaacttgctatctagaccaggctggcctcgaactcagaggtccacctgctgcttcttcccgagtgctgggactaaaggtgtctgccaccacacctgactaaacttagtttccttccctaatacttagcagcctagtcagagaaatgggcaaaaccaagtatcagctaggcatggtggtgcatgcctataatcccagcaatcacaaaactgtggcgggagaatcaagtttgaggccagcctgagctacctaggaagagctatcataaagagtggagaaggaggagggagagagagagggaagggcaggggagtgtaagcaaacgccagagtcatctttggagaaagcaaagagcacaaaggcctggagtgacccgggagggcagcctggaggaggcacttaggctggatcctgacaggtggaaaaaatttgagacctttgagagaggatggaatgttcctaaaaggaaggcctggtttaagcagaggcttggcagtgtggccatcactgtggaggcagacaccccagaagccaggggacagacaaggcagccaagatggccccagccatggccctcctctcccgcagctggtctacatcggtatcatcagcattggcacaccccctcaggagttcaaggtcgtcttggatactggttctgcctacctgtgggttccatccatctattgttccagcccagcctgtggtgagtatcctgccctgcctgcccttcatcatgcctcctatcccagcacacctgagggtcacctcgtgcctgtgtcctgcagctcaccacaaggtcttcaaccctctgcgatcttccactttcctagtctcgggccgacctgtgaatgttgcctatggttcaggagagatgtcaggatttcttgcctatgacactgtcaaggtaacctgggaacccgaggctaccatgggcctggctctgagtgcgaacactgctgcagggccagttgggagtgctttctctgctccagctgcccacccaccttgtggggcaccccctcttagtaaccctcccccaactgtgagtacttctaggtacaggtgcccaaggcacagatttgtagctccttccctaaaggggagcacaagttggttctgccagtagcagagggaaagaagtatgtatgtaaaaataagccacttgcatgccccacattgttcctggcaataggctgggcactttcttcaaaataactacattaattttctcaacaagcccaaggcaggcattgccagggctttcattccataggtgagtgaatggagagagccagtgccttgtccaaggtcatgcagctggtaagcaaaagagctggctgtgactcagaataagcaggcaagtgagaaagtgctctagggggacagcgctgtggtctgggtctctgggaacagccaaggggccttgagttcccaggcagagcccagattcaggagagccatgctcaatcaaaaggctcttaccctgggagaccttgaaggacttgaaaattaacaaaatccctgagtgtgcacgcccacggacacacacacacacacacacacacacacacacacacacattttcacaatccaatatattcttaacctggtgtgggggcagtattggagagatggctcagtggttaagaggattggctgttcttccagaggatccaagttcaactccaggcacccacatggcagctcacaactgtctgtaacatacatgcaggcaaacaccaatgcacataaaataaaaataaataagtccttaaaaaaaggggggggtgaccctggcagcttagtcaggcatggtggcacaagtctttaatcccagcactccagaaggcagaggcaggcagagctctgtggattcttagccagtctggtctacaaagcaagttccaggacagccaggggcatatggtaagactcctcagttaaacacctggatacagcaggttcctgccacccaggggtgcagaaaagatcaccacagacaatgccctgaaggagatgccttgctctccacttattttcaagtgggaaaccccgggttagactcagaatctccaaattggaaaagactataaaatcagatgatacggggtatggaggttggtgacaacccacagcaccacagctgccatcccactcctgctggattcaaaccctggtggcccatggcatggctagagctcagttataccctgtgggtcagaccatgtccctacccactacccctccccccccaccccacaaagcccagccatgccatagccccagtttcagagccttatgtaaggacaccctcttctcccacagatcgggaacctcacggttgtagcccaggcatttggcctgagcctggaagaaccaggcactttcatggaatatgcagtctttgatggtatcctgggactgggctaccctgacctcagccttcagggaatcctgccagtctttgacaacctatggatgcaaggccttatcccccagaatctctttgccttctacttgagcaggtgagtctttgctagatcagccctttttctaggctgtcagttgcattagaaatggttgattgccgggcggtggtggcacacacacctttagttccagcatttgggaggcagaggcagtcagatgtttgtgagtttgaaactagcctggtctacaagatctagttccaggacagcctccaaagccacagggaaactctgtctcgaaaaaacaaacaaacaaacaaacaaaaagaaatggttgatcctctgatcccaaaggttccttaggcacagtctagtccaggtgtctgcttgctatggtctagacatcaaatctggcccaacatctgcttctgtaaataaggtttcattggatcattcatttccaccttgcccatggccacttttgcacaacagtggtgacggtgagtcattcggtagaaatgaatgtctcccagtgtgcacagcctccagtgctgacagtcagaccctctgtggagaatttgctaatccctttagtcccatcttttcagtcagagatgaggaaacaaaggctttgagaagggctttgcccaggatggccctgtctagtgctgagagaagcagctctcaaactcagcctttaggattcgtcaccatgaaggtggtcagtccatcagctcttcaactacatagaagttcctgatgggctaaggattcagagaaggacaggcgagaaggcaaagcacaggtcctgttgatatttgtctcttctccccagtgtgggaattgatcgcacatgttagagacggaggcaggtgtgcctgtgtgtctatggctgtaggctctccaggaacctgagctccaggatcccaggatcccaggatcccgggatccaggattcactcatctacttcttattaagcagctgctaagcactgacctctctgtacacagttgatgcaatgatacagaagggggggggggcagaagacaagaaagtagtaaacaaagggaaagatgcctaggtagcaactgtgtctgggacaacaataaatcagacagataggcccaatagacctgagatgggggtggggctccctgagatgaagctagagccctgtatgagctggaaagcacacccctagctgccccaggcctcagtgttccggaaaatgactgtctagacaggtggaagtcacacccctctaggggtcaattatcttttaaccataaagttgctccagtttccagagaggcccaagtgctccacagaatagtgggctgtccaaagtccagctgtgtagccagttatcgacattcggacctcagcttggctatttgtgagctgtgtaactgacctggagcaggtactcagccctccttccctgtccacaaataagtggagctcctgagagggctgccgagtggggctgcgtgtgtgtgtgtttgtgtggatacaccagcaacagtaagcagtgctggcagggtcaggtgtgctgctaagtctaagagacacagcctactagtctccaccagacagtaagcccttccccccccctctttccttccagcaaggatgagaagggcagcatgctgatgctgggtggagtggacccctcctactacagtggagaccttcactgggtgcctgtgtccaagcccagctactggcagttagctctggacaggtaagtgccagcctgagtcctgctcctggatgctacctccaacatgtatacacacacacacacacacacacacacacacacacacacacacacacaccagattcctgcccctggatgctatcacaaacatgtatacacatacaaatggagtaacacaggcctacgcccatgcatgactgcacctacagtgacacatacaattacacacaaagtcactgacgggtcctgacacacggagtcacaagacagtcacacaaaaacagaagcctgaacacgtgcaaccacagagacatacatacagtgccatatactgacacacacaaacatccagtctccagcaccacaaacacgccccttgaagccatacagctgtaacccctccaggcctcagcagaatctcagccagagagggcgggttaggtctgggtctagagcactaaaggacagggcatctacagactgagcaggcaggagtcgtccctggaaaaaagcccatgcagagtgggataggtgggaagcacggcctgaaagccctaaagtgagattggtggtggggaggcacggtgagggaggggcgggggagatctactgtgccaaagagagtctcgatgagttactgccatcctggtttgcccaggacttggggcttcctgctcaaagcaggtgaagtcctaggcccacagtgagatcatcacaccggagaacagacaggagcagagacaagtctccatcctccgatctgaaaaccacaaatacacatcttagccatgcagcaggcaggctaggggacaagacagacagcaggcacctggaaacctgaaacacctgggaacctggggctaaacactgagcagatccctgcaaacactgaattgccacctcactgcttgctagaaacgaacaagggaagatggaagggaccaagagaaggactgaattgaatctgaagctggaaaaggtgacaattaggctggaacctgggagatgatgagaaaccagccagacaaagggggcatgtacaaaggccctgaggcaagaaaccgctctgtgcactcagcatctgacaggatggtgctgaggacatagctcagttggtagactgcctgtctagcatgtgggaaaccatgggtgtgatccccagcatcaaacagactaggtgtgatggggcacacctgtaatctagcacttgagaagtaaaggctggcggatcagaagtataaggtcattcagactgaaaaatgagtttgaggccagcctgggctacataaggcctgtctcaaaacaaacaaaaagacaaggtaactgaaaggaaagccagatgtggtggcacccagctgcagtcaagccacgggggaggctgaagcagggggattatctgagctcagacactggagacaagctcaggaagcatagtaagacctttgctctgggactggagagatggctcagaggttaagagcactgactgctcttccagaggtcctgagttcaattcccagcaaccaaaaggtggctcacaaccgtcctttatgagatctgggtgccctcttctggagagcagatatacatggaagcagtatgttatatacaataaataaataaaacattttttaaaaaaagacctttgctctaaataaataaccagaaacaaatcagaaacagtaaagtgccttgcaggagggtgggtgtggagagctaaagggctgttttgaagtcagggaaggggaaatgtgggactgtatggtaatcctggtgtcctctttgtccctgcctctcagcatctccgtgaatggggaggtcattgcctgtgaaggtggctgtcaaggaattatggacacagggacctccttgctgactggcccccgaaactcgatccttaacatccataatctcattggtgccaaggcatctagcgatggcgaggtaaagggtcatgtgggagggccatttgggttctgcacacactgctgcagtagtggctgtgctaacctccagcccccaccccttaacagtatgttctcaggtgtgataccatcaacaccctacctgatattgtcttcaccatcgatgttgttacctacccggtgccagccagtgcctacatctggaaggtgaggagttctgttcttcacttgatcttctgtggaagaggaaggcataccctggtggtcaatatgtgccatcacaggcgcttgccccccagctgagcaagtgctgctcgcacaaccatcatgactgcaaaagccagtctggcattccttcctcctcccataaatattgaggggtcagcagtgtcaccactgtttcctaggtttcagaggaaagacaagggtagcttgaattgaagggtgacctcaggtaaataggagctggggaaccatgcagaggagcagctggggtagatgtatctgcagaccagggacatggaagacagtgtgccaacctaggtagcagtgacaaagaggacggccatgcaccatccagaggctgtccaaaggggagaaggaaaggcctgctctgcagagggaccagctgaaccaaggttggggaaaacaaatggtagagtatgaagggtcttctcccagctgtgcaagccatcctgcagcagccaaaaagagccacacacagctccacggaaggaggacaccaagctgaatggcaggactgggggtgtagctcacttggtagagtttttgcctagaatggaggaaaccctaaggtcagcccccaacactgcataatgtggacatgctatgcacatctgtaatcctggcacttgggagactgaggtggaaagatcagaaattcaaggtcaccctcagctacatagtgagtatgaaaccaaactgggcaacatgacaccctggctcaaaaaaaaaaaaaaaaaggcaagaagctgagcagctgcctgctgagttcatatatcactcttctttttcagggtcattcacacaactgctatagcaactttgaagaaggcaaaggtgacccttcggactctgagatgtgggtgctgggggatgttttcttaaggctgtatttcaccgtgtttgatcgggcaagtaacagaattggtctggctccagctgtgtgagtgctgggcctcctccaggggacggccaggcacacacagacatgaatggccatggggcattcccatccagggaactgaccccagctattgggagccctgcaaagccctgttctgggctgcaaataaagattgcattgctttctcggggtcgccgaggtatgctggagttagtgctttggttgagtttttgagacagggtctcactgtgtggctcaggttagccacacaattgtaggtttgtgaacttccaacactcctcccgcctcagtctccagaatgccgggaaacagactactgtgtagtgtccatggtaagagaagccaagtccgccagcatgaatgaagagagagaccttaggaatgacactaggaaggtgtagataccagcagtcacccacccggcaggcaaatctgcctgtccctccctccctccctccttcctttcttccctcccccccccccattctctttgcttctcagctgttttctcttgaactttggaggtcaaggactttgctgctactagtcctgggatttcacatctgaaggtatctgagcaggaaggacacagatgggggtgagggatcccagaacagcagggaggactctgattggtctacctggaatggtgtgtccatcctggaccaaatatcttgggcagaggggaaagagatgctgcgattggctctgcctggtcagatggtcttgtctgtgacttgggggtgactggcatttttctttagaaccacagggctggaatgaggagtagtcacccataaaagtggcaaaggatgttggcgacagataagacagattgagctgactattccaatgtccttccccctccccattcagaaagatgtttaaaggataattaaaataacaggttctgcgataagggtttggtggcacaggccagtaatctcgatgcctggagaggctgaggcaggaggatccacaagctcaaggcatttcttggctacatagtgagttgaaggtatgcctgggtaacttagtgatacactgtatcaaacaaagtgtgaaagaggctctggagagacggctgctcagcttactgttctatcagaggaccagacttcaggtcccagcacacaaacaactgtaattccacctccaaggggtctgatggccacttctggcctccattaggaccctcacaggtgtgcacatacacacacacacatgtaaatataccctttaaaaacaaaaaggtgaaaggtagatggggctatagctcagcggtagaacacttggctagtttaagcaaagcacaaggttcaaccctttaccagccccaaataaagaaaaaactaagttgtcagtttcttgaggtaggccacccaccccaaacctttctggacacagctattggaacacttgatttggactgtcaaaatttgacatacttacagccttggagagatggcccagcagttaaaagtacttgttgctcttgcagagggccaggctttggttcccagcacccacatggtagctcacaaccatttgtaactccaattcctgaggatccaatgtcttcctctgacctctgtgggcaccaggtatgcacatagtgtgaatacatgcaggcaaaacactcatacacataaaataaatacatcttttaaaaacgtttttataacaagagagggtttgtttgattttggatggcttttcccacaggtccagacaggcagaaagttgaaggaacaggaaaaataaagtaacaaggttgtttcaatgtaccacacagcatcatctcatgtggtccatagtcactgggcatctacggcatgtcaggcctgtggtgcaggccttactgggaacttgcccctgagtcacaaagatagatcaagggacaggaaagcagtgacctgatgaagccaggagggatgacactgaaagatactgagaaattttccatgtttgaggaggaagagtttccagaacacacacacagtgtgtacaatggctgcacgttctgaaaggataacccaaaagggccacccagtctcatgtcctgcctccctaccatggtcccagaaatcatctatccttggcccccattcccacctccagtgtccctcaatgtgagcacaggtggccaccatgggaaataagagtcgttgaactctagtcttatgtgaagataatgaattaatcatttaaaactttcagaactatttaaaaccaacacctgacagaggccagcgggccagtgatgcccagtgtatgccggattctagagaaggcagttaaaccagagacttctactttccttattcccccccacacccgcctccctggagacaatggcaaggtaaagaagaaaagtttggtttagcttttggtgtagttttggggagatggggttattttgtttggattttgtggggtagttttgttgttattgttatagagtgtctctcataatcctggctgttctggtactcactgtgtagaccaggctggcctagaactcatagagatcacctgcttctgcctctcaaaggctggcattaaaggcatgcgccaccttgcccagtctttttttttttttttttttttgagacaggatttcatttagttgagactggccttgaactcctgatcatgatcatccaacctcagcctcccaagttctgtaattacaggtacaagccaccatgccctaattaacattgcttcataaaagataatgatctctaatagaaaggagaccttacctttgctaaattatttctggattgaattgtttttcatagaaacagccactggtatggatcaactgagcaccaatgcctgcttccgtggagggtgtcacacacaaaccctcatgcaaacgccactctagcagtcttacccattctttctgcttgagtggttacttagcaacacaaaacccttgacctctctacctttggacctattaataccaccgtgacaaatatatttatctattagctataaattatctgttgaatgtaatgattttcccagggaatctacatataacaggagaagttggaagcaacctccaacccccccacccccatccccacctagattctaaaagcagagaatcagaaatgggaaggcatctgctgctcaccactaaaaatggggagtatgggctacattgaaaacagtagggagcaagctctggtcctctcttaccggtgtgtgtgtgtgtgtgtgtgtgtgtctccctccagtggcctccgacacccccatttcactctaaagtgcacttatcttttgagcagttgcccctttcttggactgtaaacttatgggagagatttagcagcttagtgtttaaaataggaatggggacataacacatgttctgaacacatcttgaaatgaactttacatgaaatcagtgttgaaaacaaagcataatgacagagacaacaggcaccccccaacaaatttctaggatggatgttatgtgacatcagtgtcatgaatgtgcagtgacaggattgcactaggcatggatctgcccaagcaagagtgtgaacactgcttagtaatcagggccactgtaaccaataccacagtcaaggatgggggcttaacagaaacatacattgtcacaactctggaggctgaaagtccaaagtgaaggatgtttgggctatttcttctactgcctctctccttgatttacagatagaccatcttagtctaataaggtcttctctgagaccttactgggtcacacccacccactaggccactggcagagagccctgtctggtgtgtcccaggcacggtgatccactcagatggcagactcttccttctttgagatctctgttgtgggctgttggggaacagggtcaggggtgtccaggacagctgcagagagtctttgaagcttcaagggggtggtgagggtctctgagaggtccggaccagttgttgaaggtgcttctgcagacagaggccactggaatgctgccccaaaggttgagggaaagctgtctggagtgacaggtgaccaaggagtcccccgaaaggctggaggtagagtggaggatccaggagagaccgaagcccctgctgagggctcagaaggctgggaggctccaggttcccctagaaatgtgccctctggctccaatgggggtgaggatgaggtgtgggctactggtgggcctgggagtgcagtgggcacaccagacaggtttgttctcaaaagtaactgcaggagctggaacatgggccttgcaggtgacgctgatgggggccctgggcaggagctacagttggcagggacttcagtgtctccacgcaggctctgagcagctttgccaaggtctccatgaggggagggttgctgcctttcttttggaggaaagagggaatctagacagaggcggggaaacagggtctagttggcataaaccattctggggatagacaccctacaccatcttcacaggggattcagcacacctggtgagggccatagtgggctgcctccaacctccatagatagaaggttgaaaagaagccatgaatggaagagggcaattcactaaagcagccctcccaggaacttttggaaagctcataactcagtttgtctcctctttgggtctttcctacatggaggagtgccagagatcaaaggataagcaatgagagagtctaatgctggcactcagtttttccatttgcaaaatgggcatcccaacagactgaggaccagatgcaggactgcataagatgtcttagcctacaccctcatgttagctatggactgtgggtgtcatgacaaggcagtttgggtgcaccaatgacagcagatgtaaatcactctgctgcggggtgttgccagtggggaagatggatttgtggatccagaggatacaggaatgctctgtgttccactcagttttgctatgagcctaaagctatccaaaattatacaaaccatcttttaaaatttgaaacagcattccatatggcttaggctagcctcaaactcactagacagcaaaggatgactttttttttttttttttttgagacaggaactctctgtgtagccttgtctgtcctggaacttagtgtgtagatcaggctggccttgaactcacggagatctgcctgccttctggaattaaaggtttgtaccacctggcccagcaaacttgaacttttgatcctcctgccttaggactacaggcatgcaccaccataccttatttatgtggtgctgggaattgaaccagggcttcatgcacactagacaagtgcagtgaactagattcaaccccccccaagcactgaatgaatgaatgaatgaatgaatgcatgagtaaatgaataacaatctcaacctaccacctctctcactgtaagggtgtgattcatagaaggaaaggaagctaagcaaaaataaaatagccagtgacaagcaaaggttcaacttaagaaaggttccactgaggggcggcagatgctgctgtgctcattggtatactgaaaaagtcctctagagggcaatgcacataactgaaaattattaagtcatatgctttaaatgtgtgaactgggtggtgtataaattgtgtctgaaggaaatcattgtttttattactgtgtgtgtgtgtgtacgagcacttgctcacacgggtcacagcacacacgtggaagtcagaggacaacttcaaagagtctgttttctccttctaccatgtgtgttatgtggaccaaatttggatcatcaatcaggctttaaggcaagtgctgcctttacttgctgagccattccactggtctcttgtgctatttttaagacctcaaatggaagcagttcccattctctttcagtgaaatggtggcactccttttacagggtgtggtgagcagagctgacagtgtgtcctgagaagttgtctcagcttgtctcctctttgggtcttaagttctctcacatggaggaatgccagagaacaaaggataaggagagaacaagggagagagagtagagtacctccaattagaaactttcttccaccaggctctacaaccccatctggaaaagagagataaggccaggcccttgagcccaggcatttctgttgagttgctcaacggctgttacaggagacgctcagtggctgactggtgtgccggctacagtgtttctgagaagctgaggacacgatacatatcaagtttagaggagcatgtggtagataaaaggaagtgtggtcctctgagtccccagtggtccctagcactgttcccagccctggagcagaccacatcctggcgtgccttttgggaggccaaagacttgaaacagacatttcccagcaagcaatgtcattcacaagacagtgggaaaaagtccaccatcttcctagaagtggaaaatatggaaagacgacacagtatgcgtagagtaaaccggaaaaattaaaattctaaacagttttggagactatgggagccatctgcatcattgcgcttcctctaagctccttcaggaccaggttatggtaacgtgttgtgagagaccccaatctactcctgacattctctgactcagttgcccccactatcaaccacacagtcccaatacagcccacaagatttgaataaaaaattgacccagtattttccacaggaggtacattacaggtgtatggagggaaggaaaggagacacggagagagggaaggaggcccagagcaataggtatagaaagagggaaggagggcgcgagagagggagctcaatgaactgggaagataggaggtaggaaaaccagctcaagagaatatggtaatgcccctcatccgaagttttgttttctgacacctcagttatcgtgatcaattgctgtccttaaatagcaaacagaaatgttcagaaataaagaactcacacattttaagattgtgtgtcttttgagtagtatgatggtctatatcatcttaccctgccttgcccgggctgtgactcacactttgttcagagtatccataccgtgtgtgctaccggtcagtcagtcacttaggaacttctctgttgttagtttgacagtgctccccagtagggtttagttcatccacagtttcagacatcatttgaagtcccacagagtacctctcacagataaggggaccttccttaagaggccagctgtggtccacatcaatacttcagagctatacaacggagcactttgccccttttgtaactatgccatcaacagccacatggattagccgggtctggtggccatgaccgcagtgtcagcactcacaaagctgaagcaggaggattccttaaatccaagaatttcaggccagcctgggcaacataaaactcctgtctcaaaaaggggtgaggatagccaggcgttggtgtcgcacgcctttattcccagcactcgggaggcagaggcaggtagatctctgtgagttcgaggccagcctggtctccagagcgagtgccaggataggctccaaagctacataaagaaaccctttctcaaaacacacacacaacacaaaaagggggggggggtggcgaggaatgggtggggctgggctggggacagttgaaggtgcaacactagcctcgcctgcagaggagtctgaacttgacccataacaccatacacaggtaaacaaaggtgggaggggcatcagacaacacaacacatgtggcatttggtatttcataataaacagcccaaagcggcagcctgccttagccatctgaccttgagcagatcatgatgtctgggcctgggtccccttgcattcctttttaaggcctatgtctctgggaagctttgcagtggaaggtggtggggaaagctcaggctcagggcctgcttacctgggcaggaaggatcagtacagactggctggcaagggaccttttcgcagctcacctctcccagctgaagaagcagaaagacaccatgaggaatcccagagtatcttgcctacctgtagcagagctctccagggactcttgtgccaacagtgagacacacagaaaagtgttggatagaagctgaaatgcctgcgccctggtctgggtgacaggtatgaatgccaaccatgacaagacaccttcatctggacttccaaagagggataggtggccagaggcaaagataaaagtgaacagcgggatgggcagattagcttggggccccatgtgtggcatgcaggccttgttggccaactcacctggcagatgcaccgggtacagggctcatcatccaaggtgaacacctgaccattcacaacctttcttccttcaaagttacagtctgcagagtcagaggagacaggatgatgagatccaggacacctgggagacttggtgtgggtggctttttccactcaccgtggcacacagggcagcactcgccatccgggtggaaggggtaggtacaggtgatgggacagtccacaggtgaacaggccaccgaacccagctgtaggatacagaacacacatggccccttactagagacagctggtacgacacactagggaaagcccaggctcccagcaaggtggacccatctaggcagtacattggccatccatggtgggagaacggttgaggggtgacattttctcatctagggtcctttctgacttctcaagaacaaggcctgatttcatccatgaggtcacctgacaatagtgacccattggaaaatgcagaattatccaggaaagctcagcagcaaaaaacaaggaagagagctgggatgtggttcagtggtaaaaaaatgtttgctctaggttccacccgcagcatcgtaacaaaaacaaagaaactcagagaaaagaccaagaagcaacatttcccaaagcatgtgacagagaatatacagggacagtggacaacgggttactcagagacatttaccctgcatttctcaatccatgtgttgactttgtcccttttcatacataaccaggactgaggctgactgacagccaacagacacactgacactgtacccagcagctctagccaagcattaacttatcagcatgataagcaacgggacatctgtccttcattttccaaacatgaaaattcagtatgcactaacctaacacgctttttagactgagcagtgggctggctctggggtgtaagtgtgacccaggagtgtgtatactaagtaaggttcagtgcccagcccttcaactagtcatgaaaccatgagcaaatgacttggtctctgcaacctggttctctcatccagaaatgatgagattcactgagttcagcaacccagaagcagacatactagaccagccagagttttcaaatgattccctgaccctggctaaagatcatgctagacaggctgcgggaagatggctttcaccaggaccagcagtgagcttctccggggttcaggagctgttgctggggattgaggtctggttgggtggtgcataccaggcagatgcagctcagacaggggtcgagcactgatgggaaggtctcattgttgtagaagattctgcctgtgtaggtgcagcctgccaaacagagcacgtggtgagcatcagccagaagggtggctggtagtggccaggtgcctggccagggtaaaggttggaagtttatctagataacaagagtcaggcccagcacctccccagagattaggcaatcgataagcatctttggaatgggtgctggctgctttctatggctggattaagtaaggaggacattacagagtcttgcttcagtgtcttcataacaggggtggggtgtcactggggaacttggggtgggacaggcagatgacccatgaggctcaaggtggtcctggagacacacaggtttctgtccctctccagagtcaaccaacaaaagccccacctgtccagaccagtccccccttacaccccattcctgatgtctcccaagactccacatgaatgaggccacttggatgaaattgttcacatatacaaaagcacacacagcacaagtctgtgaatcccaatattcaggagctgaggcaggagcatggaattccagaacagcctgggctaaaaagcaaattctaggtcaagttaggttacatagtgagacctgactcaaaagaaaaaaaagtgtaatatacatatatgtgtgtgtgtgtgtgtaattatacatatttatatgtaacataaaattacatatatatatttatataagatgttacatagatacagtataagtatatacttaatatataagtacaatatatataattgcatctatataataaaagcagttgagacagtaggaaaatattttaatttttatttcatctgttttgttgttgcttatctacacttggagtaaggaatgaagcctagaatttcatgtattctaagcaaacactctcccactgaactttacctttcaacataatatgactcattttatttttatcttattttttgagattgagtcttgctcctctagcccaggctttatcctcctgcctctctcccaagtgctgggattacaggcatgtgccaacaagccccacccttggggagagattttttaagaacaaaacacccataacacacatctatcaaaaggtattcacgtcacaaacagaaactagaaagacataaccacagggctgacagttataaatgggcctttttaaatgtattctggctttattgcttttctatgacaaatttaattttgaaatagtggaaaaggtcaaattactgtggaaaacaatctagtctattttgtgtttgctctcactggcccagttctccaggtctggttcctacatcaccccaagaggattgtaagatctgagtttgcatatgtgggcccagcatggaggccttgcctcaggcaagcctcttgacttctctgagctgtgggtgctgtgcaggctgctgggagagtgagggagatgaggatccagaggtactcagtgaggaggggcctgaggcgaggcaggcagggactccaggagccctgagaattgctgaagaggatgaggtaaggcctagcctgagttacctgctgaacagtcgggacagcactgtccagggatccggatggggtgagggcaagagtccacgcagtctgtcctcttgcagctcacagagccatttgcctagaggaagaaggaacttcaccaagacttgagacagcagggctagcttcccccacaccaaaggaaaggcaatgccacccactgcctgtggcttgccttcaaggatgcctggatgaggctggggaatggcaggtcctccccaccccacaccacccctcatgccaatgaagaccagctgcttagcacaggtgataagaaccttcaggaaagtttcacctatctcaagatggggaagtcagagctaggacttgtcccctctgcttcctagcctgcttcctagcctatccctcagcagcagctaaggtcataccatcgccccctccacattcttctcagcatttccctggaaccctggctcaccccaaacctatagagaacaataaaatcctatttttatagaaaactattccaccggaaatgcctatttcagaagaccaaaatgccatatgaggattcttccttttctctctcccctctcctcttaagaatttgaacatttatggccttttattttactatcttgtaaaatgagtgccacgatcagtcatgaaggagagcctcagcagagagaggcttttactctcccttctcactgcagcacacatgctccagctggcttctcacgaagcagcctaaacaatcatcttgagattaagatgtggtgccaggaaatcctacatgactgacagggactccctaatgatacccctccctgctttatttggaggaataaagccctcaggaagccaaagcagagtggaaaaggaagcattttgcagtttcttcataaacagctatgtttggctttcagacacacacacttactcagctatgacaagacgcaggtcaagatgaaacaccacatgtcacagaaatggcaccctagctccctgagctagccacaccccaggctgtcctctctgaggcctcctgaggcccctgaggcagaccctcaaggcagcagctccctgccagagcagggtcacccacagtatctaaggcagccactaagctctactgccctcaatcaccccaaccttgcctaggagggtgcctgaggccaggctggcagtggccctgcctctggaggagcaggggtctcctgtcagggaggcaaatgggacagccgggtaaagcagctgaaggcgagcaggttgtcattcacctggcagatgcataactcacagggatcaccaggtgaccagatctgtccaatcggaaactcaaccccgttgtcatctagagagcagcctggcaggagaggtagcaaagggaaaagacacttgtcagagaacaggggtgggggtggggtgtagctcagtggtaaggcacactcactcaatggacccacaacacttccaaaacaaacaaacaaaaaacagagttggcaggaatgttctccagaactacagcaccacccttctaaagatgaaactccatgctcacagacaaaccacatgtgtttgcctaacacttgtgcaaacttttacataaacataacagacagacaaacacatacaagcacactcacatagccacagctcacacacaaccctttagaaaacacttcataccactaacacacacattatcagtctaagtgagagaagcccagcctcccttctgtattgggggctgcacagctgatcctcacctgtggtgggtgtgggctcccggcaggtaaaacagcactgtcctggacgcagccaccactcctctcgagggcactccagttctggacatggtgtgaaggagcactctacctccccgttctggaagagaggcaagagtgtgtgtgcatcagtgagggtggctccccaaacctgggcctctggtgagcagccgtcctccagaccttcaagtaaaagtgacaaagaaacatccagggggacaggaacagagaagggtgagtcctttaggggagatgcaagaaggtcctgtggtgtccccctgccctgctgggtctctaccatctcccatcctccctcttaaccctactttcatagagatttcctcctaccaccctccaatccctccccctaatctactctactccatagaggatttgaagaccctgtgccaagccatgcccacctaggctgtaggctgccaatcagagggggctggtgctcttctgggttgagggtgtgtccccagatcacagtaagtgttctaccaatacagaactgaagaagactgacttcatggagaccactgtaagacatgagagactcctacagggaccccagtctctctctttcaatgcacagctgcttatctcttccatggcaaagcatcttgggtaaattcctatgcttcccatccaacttccttcccatcatccaccgggcgtcagcaggtgcaggaacctcacacgctacctggcagacacaggtggtacagtcatcaccgcctccactgaacacagtcccatccgtataccactgaccatggaaatagcatcttcctacaagagacaaaggtagaagggctcagggctttcctcgatgagcagctagaagagtggacagctcaaggcctgactgggttagcgagtcatagccagcttaggcaacttaagatcctgtctcaaagtaaagagtataaaatgggctggggatgtagcttagtgatataaagtgctcgcctagcttacacagatccctgggttcaatctctagtactgtgaaaaaaaagaaacttaaatattaattacatttatttattgggggaggggcatggtgtagccatgagaggtcaacttgcagaagtccattccctcctaccaggtggattcccagaatcaaacttagactattaggcacctttaccagcttagtcattccactggcccaagatatcttaaaattatgccagcagccaggcgttagtggcgcacatttttagtcccaacacttgggaggaagaagcaggcagatttctgtgagtttgaggccagcctggtctacagagtgaattccaggacaggctccaaagccacatagggaaaccctgtctcaaaaaaaaaaaaaaaaaaaaaagtgtgccagctctgaaatcaggccaatttgaattgcagttcagttccatccctaactgttgggtgtctctagacagtgacttgacctctttgaatctgctttttcattaaaagggagcagtgagcaggattcccctcactgtgacaactcaaggactcaatagaccaagagagggcaggtgccccacacagcacagggcacatgctggtagggaacatcccctcctgttgatgaggtcattgttagacttaacttggaaatggagaaggaagaaagtagataaagtagatgggagttggaaggcgagggggtggggtgaggacatgttaggacaggctgtccttcaagggaggatgttaagacaagtcgtccttcaagtgagagctttttaagggcagttatgaatgtcactaatagcaaacaggcagaccccatgcagaggggtccaaagacaagagagattaaggttctgctagacagagaggtgtcacaagacagcaggcttagtgagtaactgtactatgggggtgagtgctaagagtcaagggtctgggagcttcaccctacagcggcctcatccatatagggcctgcttatcttggttacctgaaagtcctggagttttgttgttgtttttcctaagtcatcggaaaccatgatcttatgtcacagtgggttaaaagatattctgccatacccaggggcagactagtagcaagaatgggctcatagccccttctgcctacactcaagatgtgtcctagggacaggggaaggtcaagctattgagcataatctggccaaggcgcacacaggagacactcactaaaaatgacttacatcatttgacctgcccttttaaagcaggagtaggtctctcctccccgacacccaaacaacaaaaattcccaagcatcacctacctggggcacaactacagcaatctgactgtgggggagtcttgcagggaccagggggacactccggggagatacaagacacatttccagcctgaggaggcaaaagatggtggtggggacaggagtgggatcaggttctctgccaactacacctttaatcccagcacttaggaggcagaagcaggcaggtctctgtgagtttgaggccagcctggtctacattgcaagtttttggccatccagggctacttgagactttttttttccagatagatagatagatagatagatagatagatagatagatagatagatagatagatagatagatagatatttcaggttaggaggtggagaaacagctctgtgtttgaaaacacttcctattctttgaaggaacaagagtttggttcccagaacccacatcaggcagctcacaaaagtccttaactctagctctaagagatctgacaccttattctggccccttcaagcactctgcacacaaacacatacaataacgatagaggtttgggaaaaggatcagtggttgagagcacttctcactcctgaagaagaaccaggttcaattcccagcacccctagggcatctcacaaccatctgtaactccagtcccaggagatctgacactctgtcttctggcctccgagggcaccaggcacacagtggtgcatagacacacatgcaaccaaaacactcatgcaggaaaatatataaataaatcctttcgggttttttgcctgcatgtatgtctgtgtgaggatgccagatcctctggaactggagttacagacagttgtgagctgccatgtgggtgctgggaattgaaccctggtcctctggaagagcaggtagtgctcttaagcactgagccatctctccagcccataaataaatcttcttaaataaataattaaaaagtcaaataacaaagtactttttttttttttttgagaaagagagtctcactatgtgtcccaagttatcctgtcctggaactcactctgtagaccatgctggcctcaaacttacagagatcctcctgcctatgcatctcaagccctaggattaaagacatgccaccacacctggcacaaaatacatctttaaaaacaattttgaagttaaaatttaaaaagtctccagcactaggatcatctagacctgagttccattgcctatgcatgttgtggaacattaactatgtaaagaagtgttacatttgtttatgctgtggaatattactttaactatgtaaagatgtgttacatttgtttatgctgtggaatattactttaactatgtaaagatgtattacatttgtttatgctgcatttgtttaactataaaagatgtgttgctgtttcaccttgcctgcctaagtaaggcacattggtctaataaaaagccaaatgaccaaaagctaagcagaagaggaataggcagggcaggtgggcagacagtataggaggaggaatttgggcagagggagaatgagggaagagagaccaagaggaaaagagagggagacactcgcggccagccaggcagtcaccatccagcaagacatggaaaaggacatgcaggacgaaagaaaggtaaaaagccccaacgcaaaacatagatgaaaagtaacaggttaatttaagatataagagcttacaagaatctaacctaagctaaggccgagcattcacaactaataataaatctaatttcggagttggttggtagccccaaagaaagcctactacatatgcctccactaacaagattttaggcaaaggagctttaaacatgggtggattcagcacccatcccactacataaaaatgggagaatgcacacgagttcctattctctgcatgcttagcacacaggaagagtttgatgaatgctactggcattctctgtgtccctgaccatccaccaccccaacccaccattgtggccagcccaggagctgtgtttaaagatgaacagagagtgagccaggtggtggtgcacacctttaatcccagcactcaggaggcagaggcaggtggatctcagtgagtttgaggccagcctggtctacaaagctacacagagaaactctgtttgaaaagccaaaaaagaaaaaaagaaaaagaaaagcaaaaagattaacagagggtggcagcaaggattggtacacaaagcctgtaacagacctcagttcaaaaagcagcacccagcctccatctttgaatctgtaatcagagacagcatcacccacactgcactttgctgggagcctctgattagggaacagaggaagggcaccaagcctgcgcctgaaggtacagtaaatgcttatgattactctgaggagttaactcgccagaaacaaaaatactgtcaagaaggtcagggagagccgggtggtggtggtgcacacctttagtcccagcacttgggaggcagagacaggcagatctctgtgagttcaaggccagcctggtctacaaagcgagttccaggacaggctccaaagccacagagaaaccctgtctcaaacccccccccaaaaaaaaagaaggccatgaggcttaatgaggctgctctctctccaacacctttgttgtggcagtaaatattctacctggagaaaacttccctggtgaagttcctgaaagagttccatcctccccttcccaaacagatggaccctgctctgccctggctttctcatgcacagcagatgcctcaggcggagcttggatgcttctatgaccctcttaagctcagtttagatccaaagccctgaatcgagctcccttcaacatcaggtctgttcccctccttgacaacacccaaaggttgaggaaacacccagtggggatttctggttgcttaccaggcagacacacacagtgcagttctcctcgggaggtgaaaacacatccccttcttctcggatggcaccactgtgaaagcagccttagaaagacaaacaagagctggggacatcagcctcctcagagaggaggagacctgaggtttctactttgccaggcataatccttctggatcctcctctcaccaccccagatgccacagcagcggcagacacagtttccttgaactgagtggtcctaggacctctgggaaacgcacaggagacacatgcaggaccagctgcggtggctctcagtgtacattcaagtgtgtcttgacagttccatcacacaagacaggtaaaggtgccaaatggagaattctagccccattgacccaagcggccttgcccatgtcaccttgcctctctgcaactcaactgttttcaccataaaatggaaatattgcaggtggtggtatgcacaacacacctttgatctcagcacttgggaggcagaggcaggcagatttctaagttcaaagccagcctggtctacagagtgaatttcaggacagccagggctgcatagagaaaccctgtctcaaaaagcaaaacaaaacaaaaaatacaaaaatggaaatatcactatgtacccagcaggagacctgaaagtttccacaatcttggttacaaagagaactaagtttttttcccatcaggtcccaatacataggtggaacatagcaaaaaaagggaaattatctctaagacaaccagtacaggcacttccttgccaaaccctggggggaattttcgtttttatggtgctgcagattgacccaggacctacatcacacatactaggcaagcactaaggcccagccccagcctgtgggaggaagtgaaatgactgtcctcgagcaatccagtcgagcaggtgggacggggaaggagacgaaggaatgatatggactcgtggaaggaaggaacaaatgaacaatgtggactcgtggaaggaaggaacaaatgaacaagcaaaggaggaaggaaaggaactagggaaggagggcaggcaggcggggaggcaggcaggcaaggtggtccgccacgaagggtggcctgatgaacagttctccttgaagagtacttcagcacggacccgtggttctcaaagtgagattccagatcagctgtttgtctgttctcaggccccaaccctgaacctctaatcagaatcggtcttccaggtgactccaagaactgattgtgggggaggttgaataataaatagcctttgggcttcaagaggctaggggaagaaagagcagggctgagtccctccccctctgctcttaccagtacaagacggacagcaacccccatctctggggggaatcggatgggaacaggtaacgttacacctcactttcccacaggtcacctctccatcctggatacacaagcgggagtttcagccatgggcagaccccagacactgcaccagggcagtctagggacttcacacctacctggcacaagcactgagaacacccaggctggctccagcggctccctgattcatatgtggctccctggtgccagcaggaagagagccctgctcccagccttgcgccttccgggcccctgggtgaggaaggagtccccattgcctctccctggagaagtgaggggggtccgagggtccccagtagggaagaacttggtactggggtggatagcaactgtgtgggaaagaatgttggtagggccagggtggtagatggctgatgggttgctctgactccagtggggtatcctggggcccctggaggagggctgtgtcctggggacaaggcaggctggcctgcctcaggaaggagcagggacatcttagctgggtgctgccggggctgcaggatagcagatggggctagaacagccttcgggaaagctgaaatggaagcacagggtctcctgagggaggcagcagggaaaggaagtggggttacagggtcctattttggtccactagtttcctaatcaacataatgcaactgtctgggaactgctgaggccaccgtgacagacacaggggcagaaggcagggaaagcaaatgggcaagaaaagattccaagtaataaggaggtccgacagtgccaagattcacctgccctccctttcttaacagcaacaaagggaacacaggttttcctgagactgggacgcctccagagtccatcctgggacccccgcctagaggtcagggtgggggcctggtactcaccttcacaggacacacggtcagctcgaagcctgaagccaggtctacaggtgcacaggaagctgcccacagtgttatggcaggagtgatgacagactcgcctctcctggggtcgccgacactcatttacatctgtggaagagcctcactgccttaccttggccatggatccctttctcctcctcccatccctgaacccaaaagactggcagagttcacctcgagttcttatagagtccatccccaatccagggtacaagattcgactcagaatgctaggaatggggctggcatccatcagcagtagccttagaagcttcacgtgtccagtgggtgggtgtgtatctcatccccaggacaatttagtgttcatccctgatgcaaatctcatttccaaaccttctgaagtctggcattcttttgtaaacactgtcttaaaattcactgccctgctcaaagcaggctcaaaacaaatatgtaaccctctgtctaatacaaggtctttttcaagcccatgggcctatgaactaaatgtggtaatccctttctggaaatttctaagaggctgagaaaacaggagtctccttctaaaccaaaggaaccaaaacataaagtagtttgtttactccagggagcagagaggagtccttgatgtgtatctggtagagcagcgaagagaatatagcaggatcaaagaggacatggccagggaagtccagcttgggatctttcacacagagcgacaccaagcatgggatgggagtactctaattaggcagaagttctacaggaccggaaggtccaaatgttggtcttcccaggttccagactgacctgtgcatcttcctgattggcagcctaagtgtaccacacacagaccgcagatctcacctatacaggagtgccggttgccatggaggtggaagccagtgcggcaggagcacttatagctgccaatgctgttcttacatctctgctggcagggtgttcccaggcactcatcagtatctgtgaggggagatgacaaagctagtacccgtttcctcacagggcttagactctttcctgcccctcagcccactcagggccatgggggccatctttcccaacttctagactcccctaccagatgatggtctccaccctcacaatctcaccccgcccaggccaccaccttggctctaggcgggagagcagacacagcctccctgagtcccctgcctgtgttccacccaaatcacgaaccatcttcccataacaatccccaggaggtcctcacccaaggccatctgcaatggaccactctgctccaaaccttaggcctcccacccacaataagcagcactcatgagaccattacacatagctatgggggccagtgaaatggctcagcaggtaaaggtgcctccctccaagcctgatgaggtagatccctgggatccacatgatgaaggaactcccagaagttgttgttctctgacctccacatgcacacttaatgtaagaaaaataataaataaataaataaataaataaataaataaacaaacatagctatgtgtggacatccccagccctcaccttcactcttgctcatttgctcacatcttctaaatgtgtctcatcccttccccttgggctcattctgcctacccccaaatgtctttccctcttgtctgcatagaagacaagtcttccataagctttaaaaacttcccccacagagcctcctacatagaaactcacccaggctattgtttgaagctgaaaaaaaaaaaaaaaaaaaacctagaaataacctgcctgtttgtcagtcagcagaactctaagctatggaacacttgcaccacagagaaccaagcagcagttaaaaaacaatagatctgcccagtctgttaacctgatgtggaaaagccttaagagcagggaaaagaaaatggagaagcaactgtgatcagaccccagctccaatgtgactgtgggtaaattatttgtgttcttgtcagtaaaaaggagataaacagtatcaacttcataactgtgaggatggaatgggaacacacatggaaagtgcttttcctggtactccgcacatgagagtttggcagtaagaagcccgtatatatgcatacgtaagaacatgtgaccaagagaggcaggcagacatgaaaagtcatgctgaaagctaacttcccaaggtacaagtgctttggaggtagggttttgggagataattagggttagatgacatcacaagggtagaagagtgaccagagcacccatgtccctccctctcaccatcttgtgaggacacagcaagagcatcttcttcaagccagacactagtcagactatggctctccagggactgaaaacaaattcctgtggtttaagtggcacagtattagggcaactcaagcagatcaggaaagcaggggtctctagtgtgagcagaggagggtgaggagagagagggcatgaggctcgcacatagtgctcaagattcttgggtttgatgaaatttcacatgcagagaaaataatatctcagaatcgaggggttattttgtctcttctgccttgttgtgtgagactgggatgagaatcatcttcacatattcgtgcaaaccaaagtctcttggaaaagatgagtactgtaaaagatctcaccctgccaggtgtggtggagcatgcctataatcccaggactagggaggggaaggcaggaaagtggcaagctgggagtcaggctgggctgtactataccaccctgtctacagaaaagaaaacaagaggaagacatcttcttgctgggtctccacagccctagtgccttgtcccaatctttttcttttccaagccaccagactggaaggtgtgtgggtcctacagcacagatacctccagagcctggcctaccaccaaggctggaggaagcaacaaacacactaagtgacagagaccatcacaggcccctcccactcactgcctgcatccctcccaactccatagtggtacctactgccctaggtgtaactatctgccccttgttctccctgagatggttccttcatcctcatccttccctatgtcataagcagaaaattttagatcgacttggttcagaacaagtccaccatgaactgggcatgagcatggcagaacactgctatagtcccagcacttggcagatctcagctgaaggccagcctggcctaccaagtaggttccatgacagctagggataggtagggagattctatctcaaagaaacaaaagaattcaccatgctggactcaaactctaagtccatctcttacaaacagaatggatgtgagtgaaccttcgttttccccagtaaatcaggaacaacacagcatccttctcagaggactatggcatggagaatgtatctggcagcacctagaaaccactcccgacacctctgcccactcaccttggcagctatgacgatcagcagacaactgcatgcctggcccacattcacacacgaagccaccttccgtgttcacacagtggccctcacaagatgagcttaaacactcgtcaatgtctgagaaaagaaaagccattacacagcccgttctaactgtgactgtgactccaggaacaatgaccccacttccgaggggtcttatgtggaaaatggaacattaatgaggaaagtgccaaggccatgaggggagccccatagagaggagatgaaaggactgaggaactggggcctactcttaacccatgcagtaggttaaatcgtgggaaagcatacccgaggcagaaacattttgatagtccttatatggcaaccttcaggtctccaaaatggcaggacccagtgaatactgtcattacactagatggcactgaattccaggtgtgagcaggagactcagagaggggctactaactgcctcggacatcacggggacactccaagacccaggggagtgacatacgtatggcccgctcaggaataacctgctacagcaggtgtgttctggaggagtgtggggctaggagaatcgggggggatcgagaggcctgcctgggtggggaagggtatggagatatctgctgggctctctggaactgcactaaccctccgtcttccaccaccatcctccgtatcatgacacacttacatagataagtggggaagggggcgaaaatgcctcaatgaaacccagtcctgtaaacagaattcttaattggtctagataataaaaacccgaagtcagatatagagggaaatgctgattctctgaccttcaaacaggctttatttgtacaagcaagatattaccacacgggactttgaatactaagctaacattcagttaaaaaaaaacaaaacacaactctggaactataaccccaattttaaaaacacataaaccttatatacaggtgtacacacaagagcatgtacaggccccaataaaggaacagagaaaacacttcattttcgtaggaactctgagtggcactcaagaaagcatgcacttttaactttctacttactttgacatgcttccaaatgggttctcaattcctttactgttcagtgggagagcagtaaagtataatgttaaaatttcaaaccatggcgggcattggtggcgtacgcctttagtcccagcactcaggaggcagaggcaggcggatctctgtgaattcgagaccagcctggtctacaaagctacacagagaaaccctgtctcgaaaaaaaaaaaaattcaaaacaactggtgttgaggtgtacacctttaaaccccagcacttgggaggcagagacaggtggatctctgtgagtttgaggccagcctggtctacagagtttgagctctctcaaggtaaacaaacaaaaacaccccaaaaagggacaagggagacagctcagttggtaaaggtctgagctcaggttccccagaatccatatgacagctgggcacaacaatgcatggctgtaaccccagctttgggagatgctgtgcatggagacagcccagtcaaaccaatgagctctaggtttagtgagagaccctgactcaaaaaataacatagagggcaatagaggaagacacctaatgttaattctggcctccatatgcctgtgtatacacacatatatgcacatgtatatgcaccattaaaaaaaaaaaaaaaaaaaaacccaacacctccaaccaggcttttgcctctgaagagattaacaagaaattggtcatagtaaccatctctggtaaaggacacacattctgcctacagtgatgtaaaatcaaaaaaacaaataggagttggagaaatgtctacctccactcttgagagcacatattcttgtagaggacacagacttagttcccagcacccacagacttagttcccagcacccacatggcagctgggactccagttctgagggacctgatgccttcttcaggcactccacacacatggtacatagacatgcaggcaaaacacccataaacataaaataataataaaaaaatttaaaccatgccaaaatgtaaagaaaaaaaaaataacgcttagacaaaataattactaagttttagttccctcggttttcaacgtcagctgctccatgttcctctgtgagcccataccctggactttcttagtcactgcccctatcacattggggctgtccttatccttatcctcctgccccatatttggaagctccctgacagcagtatatttggtcacctgtaacctcaatcccaactctgctcctgcccatgaatacatgtgaagtaacaggaggatagtaccctcaggttgcgaggtttcctgcccctctcttccaggtgctggactccggctagctccgggaggagataccattgcatcttccccttctccatctcagcctcttacctgcacacctgataccaacagctgtctcagtcatcaggaaacccacagggcaaactcgagctacctcctgacagccaccatggttacaggtgagatcacaaccatattccccgcaggatccttggacttctaaaacaaacagcatagaagcaagcacgtgtcaacaagcagcagagcaggtgacagtctggtctctccgatgtcctaaggctcctcctgaattctgctgcagggtgggtggtctggaggccaatagatttcacatccacatctgccacttactagccatgttgacggttaactttttaggatcttgagtcacataggaggaaacttctaggtatgtctctgaaggaattctagactgggttgagatggagaggcccactctaactgtggaaggcaacactccataaacctatggagccaaactgaacacaaatgagaaactgagccgagcaatagctttcaactttctctgtgtcctgactgtaaatgcaatgtgaacagttgcctcgctcctctggcaccatgccctctctaccctgatagacgggacccttgaactatgagcccaaattaacttttactcctttaagttgcttttgccagctattttgtcacacctgcaacaaatgtggctaatacatcatgcaacccaggaaagaccaaaacgtctcagccttttcagagaggtatggaaatgcctacctaacagggtgtcttgaagatgccaagctagaacctatctcaagtgcctaatgtcagcaatggaatcttcatgttactttgttggtcccccatcagccattgtccctgttacctgggcaagtggccccttgctctccatcctggcaggaacagacattgggggcgatgcagatgccactgccacagccaaaggagcagagggctgagaggaaagatgcaggtgaggactgggcactgacaaagcacagccctggtgggagctgagaaggcttgcatcacagggatgggtacttacgcagggtacaatgcccactgcccatggaaggggcccagccagggcagcaaccactcccgaagcctgagaggcagacatgggggcccagacgacgtctgcaagaaaaaaagcactctccacaatctgtatgaagagtggcagaagctcccagctcatccactggtctgtaagttagttaacagggttctctagaacccccaggggaaagcagagggagacatctaaatgacccacaattcctcttgggggcaggaccagacaaaagtgtaagagaacagataaaagcatcagtgtctatatcctttttactccccgaggacaagggtgccttatctgttcacttcaacatctaaaatacctaataacttctcggtgaatgggaggccagaaaaggaaaaagcagaaggtctgggtggcatcacccagcgtgccaacaaggtgcccaaagctgggcccagaagggtctgtccaagcaagaataccctctggagattcaggtgatctggagccagtgtctaaaactggcaggcagtaaagctgtgattatgtcctcactttcaaaggacagacaagatccaggtaatgggaactgagcataacagtgaccctaagagggcttgtggagctttgaagaggttccaggagagggtctcttggatgacggcttccttgctgcaagcaaaagaagaccacaaaagtggtatgaaaaggaggaagcgggggcattccaggcagaggggacattgacagggactagacgccttaagtcatggactggagcaaggaccatgaatccaatcatagtcagagctgatgggaattccatcccaccagccagagcatgcctatccctgtatcagacgcaaaggatatataggacaagacaggttttcctggttcttagagttaacgatctgtgtcaaatgtggaaaccttaggggaccataacagtacagaaaagtttgctggggactatccctgggcccaagtccttttcctctcagaagtcaaaaccagagaagacaaaccagggactgacaatgacatcatacacataggagtgatgatagcaacagccaaggagggtcccgcagctgggatcttcaaaagagccaaacagctaagccaaagggaactctgaaagggacatgaggtgccatcaaagtggaaatggtagggtgggtgcctggggaagctggtggagttccaccctcaggtggacagagcgcctacaagaaagccctaaggagcttttcacgtgtggcggtgccagagagaaggtagactgagcctgcgctgggttgattcagtctgcaggaactggcaggggttcctttagggctgccctgctgtgcgcccctgggaagatgtggccgtgggccaggctaccctctgacactgtgttcccttgctctgagcatcacgcacacaggatcaccactccctcaccagcccactgtgttgatggaggactgggacacacttagggaggattgcagggttcggaagacacgcctcccgcctcctcggcctgtgcacacatgcgcagaaaccaaagcataaccctgagccaccggtggctccaaggtccacggagtgcacagggcaagggacactgagaaaacctccaaccccaaggcaacgggtgcagaagtggaggaggccccacactgccaaggaaaaaagccaggcagtggagaccatatggcacgtgctggggtcccctagccaccaaccaggtcagcgtcctcacttaggactcagactcacccagagccgggatcctatcttatgccctagccagagcagcccccagccagggctacccaactggcacaaactgctctttgaccagaccccctagtacgtccacaccagaggataccggtcccgcggctgccctctgccagtgcctcccagctccacgctgtggcgctcggtggctgggccgctgaggggagccagggctcttacctctcggccgagtaatgcccgggtgccttcctcccggtgtagcctcgggccgaagaccccagcaacaggatcacgatgcaggcaacacggagtaacagtccagcccacatgactggcagcagcggtcttggactccagtgggctcaggcccccacaccgaggaaggggctgccgaccttgtccctcctcctaggagtgatccaatccccccagttggcaggaaaatgagaacgccgagaagagggctggaatttgggggaagaccgcctgggcagacaggggatgggggtccttacaccttggaaagaaacacacaaaaggagcagcgcccgccggtgcttctctgggaggcgtggagccggggcgggagcaaagatcagggaccccgagggcggggtttcaccctcggcccacacccccagcctgggtttgggagtcgccttccacagaatgactgagggctttagaccaaagcctggtttggaaatgacacttcaggaacaaggtttttgggtttccgtggaacccaatacatttgtattgcctgcatcgtgagactcgtggacactcaaactcaggacactgggtctcctgaggctaggcagtccagctctccccaagccgaccagttggtctggatgcttgtgttagtgggttaatgtgctccccatccaaagggcattagcctgctttgaaaccacaggctatcaaatggttggatggacagcttcctggctcacctggaaaataagaaatcagcgggccgttgagagtggagccaggtacacagaactagagggctccattttgacctcctttgcagctggcccaggctagaaagaggtttagggtgagaaacgtggagcagagtgatggtgatgctgagaactgagaggaagctgaaaggaggtccacatttttaccttgttctgagtgcttggacaagcctaacctcacccagaaagattagtcacgcttttgtgtaaagactcccagaaacaggaattcactgccattaaacatcagctagtttagccgggcgttggtggcacatgtctttaatcccagcactcgggaggcagaggcaggaggatctctgtgagttcgaggccagcctggtctccagagcgagtgccaggataggctccaaagctacacagagaaaccctgtctcaaaaaacaaacaaaaaacaaacaaacaaaaatcagctagttttaaaaataactacatttgtctgaaaatgtgcttcccaaacaagcccaaatccttcgattctgcctcaagctgatctcaagatccttcattggtgaccataaatgaacactgtgacctggatgccagctaccttcccacaggcactttacttttagttgctgggacaaaaaacaaaacaaacaatccccccccaaaaaaaacgctaacttgggtgtttgatacttgttggttgccttaatttgcaataggaagaaaacctccagggcttttggtttcatggctaatcattgttttcaacttgactggattaagcagtacctaggaaataaaccttttattagtgtgtcagaactatttccaggatgatttaactgagttgtgaagacccaccctgaatgagagtggactcatcacaagggttgaaaccctgaactgactaaaaagaccagcattcgtcttctgcttctcgactgcagatatagtgagaccagcaaccaagcttctggttctatgctttcctcaccatgatggctgcaccttcaaaatgagcaaaataaagccttccttccttgcttttatgggggtttgcagatgttcacatttgggcctggatatcatcttgtttgggtccctcctataatgtggccaagttctcagcaagtatattgccaaagacgtgactttgtgtatgtgcacactcagagtcctaacgaccttcagactcttcaggagcaagcagaggcggcattgccactgtcactacaggagcactcaatggccacccagtgctcctccttcccatccttggaaagttacctctaaatccactcactacacataggacaaattctcttaatttagccctcatggttcatgccagctgtcactcaccatccagcataccgccccttctgttccttgttgtactttaggtagccccaaccctcctctctgtagaattcattccctggtagggtttactccatccacaccccttgatggcaggtggaagagcaaaaccctaatatccgcaatacagaattctggatacagaaatgtaagacattccaactggagaacccccaagaactcggagcttgtccagcagttcccctagtgtcttcaatcttctggcatccaccttgccacgcacatcaactgttggctctttcagtttcctttgttcttccttgcctgttgggtcctggagcttttagtttagtctttcacattatctggtcatcttcagggactagtttggtcagatgtttttcactcagcgcttcctttccacttctgtggcttaacaagagacccttcagccaggtgttggtggcgtacacctttaatcccagcactcgggaggcaaaagcaggtggatctctgtgagttcgagaccagcctggtctacaagagctagttctaggaagcctccaaagccacagagaaaccctgtctcagaaaaacaaaaacaaaaaaccaagagacccttcactgagtgccagatccaagatgttggctgcagaatgaaggcctctggtttgaccccctctaaatggccatgtgatgtgaatcagtgtttctggtactctcccccaagaccactcctttggaggcttgaagtaaggattgttcatcagtgcctacatggaaggttctgtccagttggctgaacggagctctgaagatgaccttttacccggacaagtgattaaaggtgtttaagagggagatttcagagtgtacaggcagaatgtcagcatccaaaggtttttggaattcaatctcaagtgaatacatacaataaataagtataagtaaatgagacaaactggaggtgtagctcaatggtcaagctctcatgtatcctgttacagacatgttcaactccagttctcatcttcaaataaaatgtctttaccacctcctctcctctgtctctgtaagagtcagaagtgtcctcaaataggaagcaccactttactcagaactggatgtagaaccttggtggaataagtttgactctgcatgatgatgaagcgacaacaatccagcctaaggacccagaatctaagctaagtaaccgtaccaaacaaaacagcaaaattctgcaaggactctagattccaatttcaagacagactactgatagtaatcagggcagtttgtctgtggtgctaggtcaacccactaaagagcgctaggacagataggagaacatgcacgcacgcacgcacgcacgcacgcacgcacacgtgcatgagcacagcaccagaggtgagtgggctacaaagtaggaaagacactgtctaaatatcaaaaaaacaaatctggtagaacagaaccgtgacctggcagagacaacctgtgattgcagatttcaatttcaatgataattacaatctggaggttattgcttgcctgtctgactcattaaaatggtctctggtaatggggaagggcgtttttcaaatttaaacttttgattttgaggaatttgaatcagtttcaaattcaaactacagcttttgacatgttattgtttttctaaagacccctattccctgggggaaggggtaaagaggagtaagggaggaactgggattggtatgtaaagattgtttaaataaaaaaatagtaaaaaaagagtccctaccccctaactctcaaaactcctgctttgtaaggagaaaaggatggaggcaacatctctcaagacagacttgccatcaggccccaatgctgggatgcttccttgtcttgtttccaagctggaaatctctcaaaaccatagcttaagttgaaaccccaattctcctgatactttatcaaagattggccttttttatttgttttttttcaagacagggtctctttgtatagatcaggttggccttgaactgaaagttgcctgcctctgctcagattaaagatatatgccactatttgccaggctcaaaggctggtcttaaaggagccagcatgttcaggatcaagatttctagtgggacagagcaccccttgttcccaaaggcagaatataggctcaatccatgcagggccaaaggctgactctcaaatgtgtcctgctcctatacttccaaaccagacactgcaggctctgctgggtcaatcagaggaataaggtaagactcaacaggaggagctggagagacggctcagctgttaagagctcgaactacgcccacagaggaccagttccgtttttagccaactacagcaggcagctcacaaccacccataactccagctccagaagatctaagtcttctcctggcttccacaggcacctgcactaatgcgtacaaacctactatagacagacacgtacatacatagtttaaaataaaaatcttagctgggtgttataccagcacttgggaggcagaggcaggaggatctctgagttcaaggccagtcagagctacacagtgagaccatgtctctataaaaatataaaataaaaatcttaaatagcacctggagctggttgtgcattatacacagtgcctgtacaatgaagacaggaaaggcagcccaagtggcctcaaactggcctcactgctaccagaaacaaccaaaataactctatcttccttggaatcctactcaaaccaatcatgaacaaaggatgggtacagacatctactatgcaagaaatctgatctgtgaccgcagcgaccacacagaagatgccagtcacttagttctgcagccaatacagagtatatctggaatgttggacagctgggcagaaaagaaaagcagaaacagttttcttcttagattctactttatttggtaaaattcagaaactaacaaccaattcacagccccctacctccttctctgtgaagaagggagttccccgagacaaaagggctgtggcttgggaattatccaccttcccaggtttccactcaggcagccgatggcctgataggccttcaggctgatgttctcagaggcgagagaagaaagcaaaaggaagctctcacttcaagacaatgaaaccctctcgaccctcttccccctacctcaacctccccacacccacaacctacataagacagtagaggacaaagcatgagtgtgggtatcacacacatacgtgcacagagctgcttcatgggcaaagagtggcaaaggtcctccccagaaggagccaactggcaacaccattcaaggcttggtggtccaaggtgatggctggtaaaaatccagggagaaaatattccactttcagcccattcctaggtctctagtgaactggttttagttataaaaagccctgtttccacacaggtcagctgtggctctaggggcaggtggctagggaaaagcctcccatgccaagaagacaagggtgggaaagggaggggaggacaggagggcagtgcctttaggacgggtcaggaaaagagcccctgtccttggctaatggatccgagtcagctcttccacgactttgatgaggtcatctgcagtcgcctcccgcttcataccactgccatcatcatactgaaacaagacaaggagaagggccatgtagacaaggtactctcacctcagcaggctaggagatgcccactgaccaccactgctgcagcaaggaaaaaggtttcaccaaaaacctagccctagcccctaggtcagtcaagctggctctgagtcctccactactgaatattccctcccaagagcaccctccccagtgagccgccctgaactccagaagtggtaaagcttacttctgtagaaacctaactccagctaactccaagaccttctggtcttgccagagagcccaggccttttgctaaagtggaggggctaactcaggaagagttcccaacacacagctctacccacaagccccaactacaccatctttcccttagcatcctttttaggtggtgagcactatgcccaatgaattctagaaaaacctggagtcatcaagtctccaggaatgacacctgtttaaaagacctacacagcactgctcacctgaaggtttgccacaacctcctgcatcttggggcggctgatatctaggaaactttctatcaggtcaccatcgatgaagcctgtggctggttctgtctttcgctcagtgtgaaaggatctccaggtggacagagttaaagaatgtagcttatctgcaaacacccctactctcatttatcccccacctctgagcaagagggagtcagaagtgtaatagtaaacaatgtttctactaaaactcatactacttttggatagttttggatttcaaggcaatgtaaaattactgcttaacccaatgtttctcaattagggttacctttaaaaggttatggcaaagcccaaacaaatatggatggtcttaaaaggtgttctaggtgaatctgatgtccattatcacccacctaagtctagcctcaagacccctgaataaactaatgcttagggagaaagcaggctacccgaagtcctccctgggccagtcacatacacctgggaggacctgaactgcttgcttctgcataggaaggaattctggtgtccccggatggccgatcctttactttctgaagttttagcttcttcactctcccctgttcctctgatccctcaaaggatgtgctcctacagggacctgagctccctttaaggtagccctggtagaggaactcaacataactgtatattccaaccaagatggaccaccctagcttgataggattcactacaccaccactcctttactattgtgtgtgcctcaatttttttttttggggggtgggttctctgtagctttggaggctgtcctagacctcactcagtagaccaggttggcttcaaacacagagagatccacctgcctctgcttcctgagtgctgggattaaaggtgtgcaccactgcccaacctgaaaatttttacactcaaaaactgcaaagacaggctgaagaaatagtttagttagtaaagtgcttgctgcacaaacatgaggacctcagtctgacccctagcacctatgaaaaagctgagcatggggaacacgcttataatcccagcaccgagaagcaaagacaggaaggccactggggctcactggctaaccagtctaccctacacagtgaagtaagagatgttccaaaatcatggtggacatctcttgagaaatgatacctgaagctgactcctgacccctgccctccttatgcacacataaagtttaaaacaaagacaaccctgttctgtgcaaaaacctaggaaaacatttccagaaatggctaaagataaacacagctctctgcatgcactggaatgtgcctcccagcagacaagtactctgggcaggaaggatataaggagtgctcgatcttgcccacacttttgatgaccttattgagtcggttctgcatgtccaacaggaggttataccagctctctgacagtgaggtcaccagccctgaagaaagaaggaggcagtgaggtatagaacacttcagagcctaggcaaaccagggacaagcttgctgcagttgagtgtaccctacaggagtgatcttacctatcatgccgttgaccgtgccaaaaagcaccgacccctgtgtaggggttgaagtctcgcccagattctgcataactagggagccatggcagaacacattgacaaactcgcccaggtggaagagaccaacctcctgtaggtgctgccgctcctcatcagtggtggcagcactgaaagacatgagatgtcactttctgagcccatctgctaaggaggcctaaatgaaggaccacgattgacaagatactgtatgttgaatatcctcggaagaccatctggagggtagtctacaaagcctctgggtcttagaaaggaaattctacccatcaaggggcacactaaggccctatacaacacccaccatgctcagccccacagacccagaggcccagccctcgccatgttcctgcaaaggctacgcacctgtccttctgacatacaaacaagttaaaggcattttcagctcccaggaaattgtcatcatccaagatttccactgcactcatccagttgggattaaagtctcgggcaatctgaaaataaacaaggaataattagtatagtctgtggtgtacatggaacccagctatgaaactcatgaagcctttggtcagaagccaaggccctacctacagaaagtgcagccctgtgtataataatggccaccttagcgattctctcaatcctaccccaccctcctcacctcacccaaaacctgaccaacacaggccactggttataatttcccagagatggagcttatttgatttcaggatcggcaaggtgggggaggggatttcctaaaatcttaatggacacagaatgtggctgaggaaggaccgtcaccactggacttgactatcctttgccactcaacactggcaaggcataatattgtaagcaagagatctgagatcaagtcctacactacctcttcaaagttcccttccatgggcttgtatgcaagcagcagcactgagcgcatgaggtcgcccaccaggatgaagtcccccttggtcttcaggtagagggccatgatgttgttgtagtgattacactcagtgcggagctccttttctgtagtccattcatagagccgcacctgggaagacaagagacataagcctgggagtccagcctttggagaatgactgtcccccactcaatcttccactccctacagagcagagtaagttggaaaaccatctatgtggtattagagtgaacagttatttcagtatgtacacacatgctgaaataggaaaattgagtgtaaaaaaaaattagggataggatttaacataaaaggagtctaagtaaaggagacaatcttgcaaatgttaacactgtaagtaccctgtcctttgtgggtaaagtctggtaactaagctgcagaaatatccctagaaagagaaaatcatctacacaatttcctaatcagaaaggaaaaatactacctatctgaacccttctcaaacttgttcattcctgaaatttttagtatgaacccaatgagcagagcaaacaatggaaaaccccaagaaaaaaatacgagtgatagaggaatctgaagaactagattctatggtcacttctagctgccccaggagggtttaaaaacaaaactttttcttttccactgtgatccttctttaatttcaacctcttctccaaaagaatgaaggtgcttcataaccagtattcaacacggcccagggcttcacaagattaatttatctaagctgacaggcctcccttgcagatccttcagggcccagataatctcaccacagcttctgcacatctataaactccttggcaggatgtataagccatgatctctttcattttttttccccagagtcctagccccccaattcactcttaagaatcttgaggaagaaatgcagtgactagcaaaccttcaccagaactgaaatgtggccctcggttattcattagcaacgaaggaccaccttccatgctgtccctctccgcagctttcagatgttctcccaacacactttaaaacagtcacctagttctcgccccacccctactacaggactataatataatccttggtgactttactattcaaagagaaggtccttccaatatttatcaagctacatatctttcctagttatacactagtagttaaaggatattaagaataatatattcttatatattaaactctgtttaaatgaaacattcatttgatactgtatatctcactacagaggccaggacccttaccctttgctaatctccatagcactcaggatctaaaaaaaaaaaaaaaaaacatgggacccagcagtggtgtatgcttttaatccaagcactccacagaaggtaggcagatctctgtgagctcaaggccagcctgatctacatagtgagttccagaacctgagagagatgttgtctcaaaacaaacaaacaaacaaaaaaaaaaacaaaaaacaaaaaaaaaacaaactatgggagttcccacaagtccatccaaagcccagatcaacctcagtgacctaatttccagctcagagtctattattcccactcttctgttatccctaaaatacacatgcaactcctaaaagcattaaaagatagacaaaaccacatgcaatggacctcaccgtgctattgatgctggcaagcagcttcccattaaattcgaccatagagtacacagcccctttcacttccttttcagccacagtttgcagttttcctgggggacaggagagatactcttactattttataagccctcattttacctagtcaaggtaaaatgcccttctggcttaagcttgcctgaaacctctcaaatgaaaaccaagagtcagtatatagtgacatgaaacatggcttgaagcacaagtcccaagaaatgggagtgactccagtggataccaagatctgcctatcactccaaggaattctgtttagtctctgagatcttaagaggctacctgctttcccaggatttcacttgcctcataatcgggacacggcctactcaccatctgaatactggaagaccacaatacgaccttgcttgggctccgcctcttcaggatataccatggctgtgcccacaatgaagtatgtgttggggtctttgcccaacttgcaggagacgaggctgagggcatactcattctgtagaaactgatgggcatgaagcactaggagaggagagaggtgactgatgacacttacctccatcgcccctcacaatcacatgcttttgtgaggctgtggcttgggcagtttaagaacgtgagccactagctgcccctgcctcttcaaactccctattgacaggaccccaacgctccatatttacggcaactgataggtgtcaatggtgttttctctgccccacccccagtcttgcttttcctcttagaagagtctaccacactgtcaggatacagaaacattctagatcccagaatacaaagaggatataggtgaaaaggacagaaaagctcgtctgcaccttcaaaagtgtgctggtcaatgatgaggaggttgtgcacctccacctcttctccgaaggaagtctcgtgaggagcagtactgctagagaatagcttgctggagctgacgctgctggacagggcctgccgacagagaaaaggcatgccatccctcttaaagcagaacaggggttggaggtgcacaaggcatgtgcgtggaggatgaacaagaaagctgatgctggcagagcagcagagcctgatgaacagagtgtttcagagaatacactggaacctgaaggcaaagagccagatcacacatgcaaatgacatgttggcccaaaatcaaagaatcatggaagacaattcaatagcaatgtcgcaagtcaatcatgcaaaaggaaaaagatgaactcaagcaacctacaaagtgatggactccaccagttcacaggaaaagttacttcaaataaaaatggagtcaagaggctggagagatgtctcagcagttaagagtacatgctgctcttacagaggacccagtacccacatagtgcctctacaacttcagttccaggggatctgacatattcttctggccgcctcaggcaccaggcacactcatgatacgtacacccatgttcacaaaaactctcatacatataaatggagagaggatctttgtactctggattaagggaggtaatcctatcagatatgtagcacaagggagaacacatggaagaaaatgatccaccccatctccatggaatcatgtgtctcttaaggttaccttattataactcttttttcacagacaaaaacaaaacaaaacaaaacaaaacaaaactgtgccaaaggttagttttgcccaactaaggtcacacaactagcaataaacctcaaaaccaattctctactgggtttcattatcatgctgtcttttataccactccaccctaaacaatacacattgcacagagcattcaaactcataaaagatggaagtgatcagtttgtaaggttaccaagcaatagttatgaagtctggaatgagggttgtttctgtctgtgtggtgttgggcatggaagccagtgcctgtgcacgtagtcaagtattctactactgagttacatgcccatgtctctctgtaaagttttattgtaacccagctaagcacactgtctttgaggctacaatggcaaaggtgagtagctgggacagagtccatacattctgcaaagtcagattatttcctatgtcaccctttgcagaaagcttgaccatttctattgccatccttctttgcccactgtcctcacctgggtgctggcactgggtctcagagcagttgtgcctccactagtgtcttggacttcaatacgactagaaaggaccccaaagcattgagacacttcctgatagcaaatcttcctgcaaaacaagtatggaagaacagtgtcactcagaaaagtctgagacactatctaccagctacctctgcatctcctccagtctgcactcacctgggagattcgtagaggggaaccgtgcgaatgtggagtttctggatctcatcaatggtgccaatggtgagggtgctgttattggccaatgccagactgaaaagaagggctacagttgagtgtaacttcacaaggaaggattctcccatgacagaatgacgaagcttgctccaaagcagagtcttaacaccaactaatgccaattcacttgggaagacctaattctgatgcctggtccaccaatggtcttacataactggtctgagtaggcctaacagctttggttaaggttgagaatcacagctcaaggtagaaaagaaaatctcacataccaaaggctcactggctggcccagcccctcagtatttttagcaaattaattaatttatttatttatttatatcaagccccatgactgctgagtggaactagggaagtacataatgatcactatatctaattagttctaaattaaaatgcaggtgtggtggcacacacctttaatcctagcatttagacaacagaggcaagtggatctctgagttccctggcagccagagttagagaatgaaaccttccttaaaacccatgctcttccctgaaaaaaaaaatccaaaacttaaaattcttggaatatacagattataaagcctaatcacctcagaatctgaggactcaaaaaaataatccctgtgctgttctttatactacccattacaccaccttactcatatacttactgcattgcaaaagcttgcagatgtttctaataaaaaaaatccccatcccagctatttactgattttgatactagggaaaacctaggctggagtggggacattgaggacatggtggaagaagcaacacaatgccttcagtctgtgactactgctcaagaacacaagctcacctgtcaggatagccatctgagttgagaggacacatatagttcacctccttgaggttgacattggagaagaccaacttgtggttgctgctatagatgacagtgggccggtcagagcaagcaaagacgttggtggtagaaagagaacggaatgtcctcaacactgtgggctgggtgcccaaagtcacctttttgcggtcactcagcaagcctgcagaaagtatggcatgagaaagaagggaagaaaacaggacaacagctgcctggttaaggctcaaagccacatcctaatgctaagaccacagcaccaccaacactactatttctgaaagagccctcactcaaatgttttttctcacctgtctcgatgttgagcccaaagtagaaaagagccccatctcccaaggcacagaggaggtaatggctgctctcaaaggtggtcatcaggatggatcgaggaataatctctgtgggaaagagggactttgaattctttttttttttttttttttttttttttttggtttttcgagacagtgtttctctgtggctttggaggctgtactggaactagctcttgtagaccaggctggtctcgaactcacagagacctgtctgcttctgcctctgcctcccgagtgctgggattaaaggcatgtgccaccactacctggtgggactttgaattcttattccatatcctaactgggatcctaacccaagataccaatagcacatacctccacctagcatctccttgtgcagtagttcaaaggatgggagcttcaagatacgggctgagatgtctgtccagagaccaatggcacaaagcggggacagcccattgctgtcccctaatggggtgatatccaagcaagccacttcatgctccatttctgtgtggctaaacaaagaggaatgaacatggcagaggaaggaattcagggaccaaagaagcttcacagagcagagggtactaagcagacacaaagacaaccatgcacctgatttgccggagctcctgaggatggatctgaaggtagtatagtgcccttcccacagcaacaaccacctggctgctgttgcaagaggccacactgatgttcttgccctgaggctctttccactcgctgaccaaagctttgggctcttgagagaccaacctcacagatgctgaagtgatctaaagaaagaacaggtatctccaaccatctgcaaaaaggggccagtgctacccactagttagaacactaataaactatagttcttctgccatacagtcaagcctctggttccaggaccctcaaggataccaaaatctgcagatgcccaaatccctcatatatagtatagtgtctgcacctaacctatgtgtaactttccatatcctgtaagtcatctccagattacttgttctagagctgagaattaaacccagattactttacaagacctaagataatgtaagtgctggataaacattgattagggaataatgataccatcaccccacacacactgcagtgtgtatgtgtctatgtgtttaatacagacacaattcacaattgttttttgttaaatcaaaggttggttgaatccatggatgactcaccaacatggagagccaaatctgtgtctctcaaaaatttaactacaatagacatttttacattatttttagtgccataaaaacattattttaaaatctagtagcagctactcttgcattctaggtcagatcaaagtctaaccctttacctggataagctgctgatgagccacgttgccacaaaagaaagtctgctgatcatccacaaagcccatcagttccgtttcttccacttcctctccatttagcatgagaactctgcaacagaatggaaggctcaagtcagtctgggatcagcttcccaaccttgcaccttcatcccataagtacatcagcaacagacctgtccttaccttgtctggcccacaaaagagagtaccaaagtgtcatcagtctcccgactggggtcagaccgcaatggccataaacctggaacaaggaatgaagcataaagaagcatactatggaccagcacccaagagggggcatcctatgcaatgagagggacagagatccttgagtcacatcatcctgagttgatatccattctgttccttcctggtatttagactctgaagaagacatattttaaaacctgttggatgttttgctgtggaatacagctcaatgacagagcatttacctagaaggtgaagccccggttaaattcccagcagcagatttttttttttttttttaagtatatacgaagtctcaccttacacctcttctgacctatcccccaaattagtaatcagcaggagttattgttcatactactgtttttactagggaaataaggtttgtattacaagcaaatacaaacgtgaaattgtttatcatacactgtcctacaccttgccttttaacaatacatgcaacaattctatcaaaacagtctcatttcctgtaccagagtacttaattgggcagatgtatcaaaaaggagtaagctcaagtctcccactttatgcatacaaggtcatggagaagctgtgggagaatcacaaaacctggcttggtgatgacagtctctataaagagcatgtttacttcctagagcccagttaacaatgtattttagaattctgataaagcagattactgctgtttcttttgggagagccggtgcatgccagggacaatgtctcactgtggagctcaggctgacctcacactctgcatccttatgctacacctagctcatttacgtttggtttttatttttcttttattgtaagtggatcctgttagccatcttttacctatttgaggaacaagaatttgatgctcttttttctagaaatcctttaagttaggaagacttttaagatgaattccaattattttatctagactgtcatttctgactgagcaaatgatgtttatgttttgaaccaggtttactgtttcacagagctgaatttatcaatattttgctcctgtatttgttgaacacgtgtgcatttgcaaggatgcatgtacatgggtacatagaggcctgaggttcatactaggtgccttcctcaatcactctctaacctatcttttgaaacaggatctttcaaaactagggatacaaccaaggggtagaatgtttgcctagtagtagagattcaatctccaatatttcaaaaacgaaatgatcttttccactccaaaattataaagaaattcataataaacgtcttgtcctagttctttatatattaggcccaaacttatccttcccaaatgcctgtagtcttcccagtctgatcaactgaagtctcatagatgtcacactgaactggaaagccaccactgacaacatatttttatgtggaactatgtctgtttctagaccaatccccatagactctgcctatccatgcactaacccaacattttaatggttctgctatgttgctcaggttggttctgataacccagagtcaagcaattctgtgaaagcccctaagcaggtgcactataggtgtataccaccttttgcagtaccaggggtcagaatgagggcctcatccatgctagcaagtgttctacccccaactaccaactccactctcaactgaggcttagaaacatgatttagtgtgtaggagggttagccacttctcactgtcgttgtcccccccccaagtttttcctcactattctttctttttctatgtggactaagaaaaaaactaaaggtatctctattgagaggcattaaagaaaacttaaaagaacatttttttgatttttatttatagacttggcatatctttttcatttggtcactttttttggaggggagaaggggttttgacacagggttcctctgtgtagccctggctggactggacctcctggaccaggagaaccacctgcctctgcctcccaagtgctgggattaaaggtgtacaccaccaccacccagctcaattctacttctaattaactgtgctcgaatgatagctgtttgtttcagtctgttcctcttatagcctacttccttattaacacatttgattatctatagtggttcagttgatttgagttttgtagttaaatgttcactttttttctaaatccacataactatttagagcttgacttgcttttttgaagctgtgtctcctgcacacaaccctgaactggatttgctgtaggatttagtgtgatcatttttccttcataacaggtaacgttagctcattcacacagctgtttggtatcatttctgtcatggttttaagttatacacccccccccccaagccagggtttctctacataggcctggctgtcctagaactctctttgtagaccaggcttacctagaacccacagagatccccctaactctgactcttgagtgctgggattaaaggtgtacattattatgcccaacttgtttatacttaaacagtctcgctatacaggctttcccttttccatcagttcccttacagtcagttcccttacagtcagtgcctgcttccacattcttctacactagtacccaattttgatcatgttccaaagttttcactaatactttaaacccgcactatccatgatctatcattatgatttttcttactcctcatctgatggtttcttttagctctcaccaaaatgcctttacaacatataatgaagccaaaggccaaagtcactcaagtaagagctgcatcctttgtccaccagaggctacctttgatgcctggtaagtcaatgctggcatgctcatggattccaattccgttccggatgatccgcaaggaaccttccttgaaagccccagagcaagtgaccagctgcaagtagagaaaaggtttctcaagaacccctcaatagacttgggcagttatatcatgccagccctaaatcccatgacccttactatggaatgagatttgagactgcagacttagcagaggttggtctccaagcccctcaaatataccaagcagacaagataccctagttcaaaaagcaaaaacttcataccactgttcctaacaagcttgcttagatcctggaacctggtttactacaaagagctagagtcagacatagtaacttgctacttacaaggtgaccttgggcaaattacttcatccttctcagtcttaaagtttccccacttctgggataaccaagaatatatcagacaaggtgctcatgaaattacaggtaatggaatagacagtctctgtcacatcaagataggcacacaatgatggtaggtatcttcacatcatcaggattagtgaaaaggctcttaatattacttattttcaatgcatactcctcattctagataagcaagcaaggacagctgaacaggcaactaagcatctatttccagaagactcccttacctgaccctgtccctgcctttccaggtccaccacacacatatccacgatgggtcctaaattggtaaaagtttccatggccactacataagagccttgttcattgctgtcgacgttgagctaagaaggaagaacaatgttagtcacagaacatccctaacaggaccacattatccaaaagaaattcaatcttgctagatctgtcctttgtactccaaaagaaactttcagaaggggactgctgccaaacaaagcagtccccactaaccaggcagcaaatttgaacctggagtctcatatataaccatcagataagcagtaatttttttttttaaattaaaatgtttaaacaaggcatggcgacacacacctttaatccctgcacttgggaagctgagacaggcagatctctgagctctagtctacacagtgatttctaagccagccagtgctacatagagaaacactgtctcaaaaaaaaaaaaaaaaaaaaaaacaacaaaaaaaaaacaacaacaaaaaaaaaacaaaaaacaaaaaaaacccagacaaatcaattacattaaaattttaaaaaacattttcctaaggggaatgtcctaagtttgtatataataaaagggaataatctattatattagaccacgacccacttcagggtgaaagctgagtcttgttcatcactgaatatatagggcccttcactctgacagacatgtttactcaagaaccattaagacataggtaagaagttaaattaatcaggcaagaggtagatagcaaagatacggataaacaagatatcactgagagacatgagtacagtgaaaagaaaaccagaaaggtgatgttttctcacctttacgagctgggagtcacctaggcgagacccgacaaatacaacaccattatcgaggtatgttaggcactctgcaatggacgtctagaaggaagtcagtagatcagagaaattagaattaaccctttagggtcaccagaattgtcctacctaaccttgtaactcttgaaagaccacttccacaagccacaattcagtaaacaattcttctgatccccgaggcacattaatctctatatccctgaactttgtgactgtctacttctcacaccattccaccaagaaaaaccaacaacttattttgtgggtgatagttccaagcaataattttaatccaacacttctagtctacacaaaataattagaaaccactcaaagtcactcattgcataagtattaatttgcaagaagagagctggggagatgcttaatacgaacaaggtacatgtctgaaaatgtcagtaattaaaataataaagccctctggtggcagtggtgcacccctttaatcctagcactcgtgaggcagaggcaggcggatctctgttagtttaatgctagactggtctacagaacaagttccaggacagccagggctacacagagaaattgtccccaaaacaaaataattaataataataataataataataataaatttaagtcttttgggagctcttcccagatttcattaacattaatctgttgtccttttatacttaggtttcctttcctctttttgggcttttgctttttggtattttggtctctctttctttcactattttattattttgtttaattttttgtttttacatccctatcaaattgtcccctccctcctccccttccagttcttcccctgcatctcctcctcctcctcctcctcctcctccctcctcctcctgtttctcttcagatacaggcaggcataagccagtcatggcatatcaagtttcagtaagaccaggcacctcctcttttattaacgctggatgaggcaatccctaggaggaatgggttccaaaacccattttggaacagaaacagagtcagagacagaccctgttctcactgttaggagtctcacaagaaggcaaagttacacaattgtaatatatgctgagggcctaggtcttcagtctgttttttggtttttttggtggggggtggcaaattggcaataagctagctatgtagcccaggctggccttgaacttgccattatcctgctttagcctaagtgctaggaccataggtgcacaacactatttccagccatttcactttctttttatgcttcccacgtcacccattggcatgtgaaattctcatacagggaatttatttaaatcattcaaaacaaacgaacaaaccaaacaaaaagcaaggcatggtgacacatgcctttaatctcagcacttgggtgacagagcaggcggatctctgtgaattccaggccagtctggtctacagagtagttcccagaaagccaaagctacagagaaacactgtctggaaaaacattaacaataacaaaaaacaccaggcagtggtggaatacgccttgaatcccagcactcaggcaggcagatctctgagttcaaggccagcctggtctacaaagccagagttacatagtgagaccctgtctcaaaaaaaccaacttccacagtagaactgatgaccctttactgggtgcataacaccctaattcccaaagtataattgtaagatcacacatctggggtgactaagcacctaggagaataagataggagcagggacaagccctacctctccaaggagttccactcggagatccttgagggtgaccgtgccatccatttgctcttccttttctaaaagcagcatgaagagccgtccttccatatctcccagaaggtatcgtgagccattaggatccacccgattgtggcacacaatagtgctttgctgccaaccaagaaggagcagccattacagtcagaatcttccagccagaagtctttagtaatgccttccaaaccctactggctactcactgcctaatccaaactcagctattttatacccaaagaagtcagtcagattataagacatataagacagtaaataggcagcctttacactttgaagataattttctaaagaggtaaatcaatataccttaaaattttactcatatattctatgaaaaacagaaacacatacagacctggatcagaagaacttaagaacttgagcctaaattgtagctcagtgttatagacttcagctaaaatatgtaagatgtgaggctctgggttcaattccccacaacagaaaaaaaataaataaataaaaaataaaagcccatatatacatatacgtgcagaaatacaataagcagttacatgtattcaccgcactacaaattccaccatagattacttatattcaaaaagaaaataagattaagcttttatggtctaactttcatggtttaaagtagtaaagacctaaaatttttatgaataatttcaattctaaatttaaggtgtatgggtattttgccagaatgcatgtatgtctgcataccacatatgtgccatgtcccatggaagccagaaaaggcatcagatcttgtggaactacagacagttgtgaactgacatgtgcatgctgaaatgaaacctgggtcttctgaagagtagtcagtgctcttaaaccattgttccatttctccagtccccattatgactcatttttaagtatatgtaatttatcaatatactgagccctcaaagtactacattcaatagaatttgctaaaattctttttttctttaccttggtggctggggattaaacctaaagcctcaaacatgttagtaagttctaaacctcaaactttcctttcttaatgttgcagtatttcaaaagagtaaatagtatttctcctagcttagcaagcaagccaagcaaaaccgggctactcactctacatttcccaagaataaccaacatgttaagtacatagtaaccagtgtgatagacatgtatgaacctcttcttgacagatggaaagggaggagcccaggcaagaacaaggaaaataaagatgcaagaaaagataaaccacttgctcaccttgatgataggaggagcgattgccaggtatttatcaccattatgataggtgattgattcctgtccaataatgatggcacctccaaaaggctctgggactgcagaagaaaagcagcaccattaaaaggctcagtactttggatctgccaagagaggcagaaatggcactggtttagctattaagacaatcatcatttgaaaaaggaaatcaaaacccaagaaatattaccatacatacaggcttctgaggatcctattttagaaatcttggaggggtctgctgagacctgaccttttttggtggtgctaggcatcaaagccagagtgtcctcatgctaagtggatatgctactgctcaactatatccctagtcctggattttttgttgttgtttatttgttttaagatgggaatcttaaaactgcccacactggtttcaaactcctaggtttaagtgattcccaagcctcaatctactgaatctatagacactggtaattgtttaaaaaatttcttggtgctttgtagctcagaagagtagggattattcccaatcctcttccacatgcacccccacccctgcccagtttctctcctacacttctgaactcttataacaaaaggcttttacttggttccgtctctactcttgctgcttagcttgattctcacactccctacatcaagatcacctttaagagctaatattgttttaggactttttttagacttattagttatgcatacatgtcagcctgcaaaccagaagagagcaccagctctcattatagatggttgtgagccaccatgtggctgctgggaattgaactcaggacctttggaagaagagccagtgctcttaacctctgagccatctctccaatccccttgttttaggattttaaaaactttcctgttgggtgagatagacaacataaggtaagggggaagagtataagatgaacagtggcaggcctggatcctagctcaggctttaccatttctgtgcaggcctgggcaagtcccactggcctattttctcatctctgaaaaaaagtcagatcagtttagctccattagtttccttcagttaccaaatttaacaatgagacacaactccacacgacactctgcaagtctacctcaatgcctgcactcaaaaagcaatatacctttgtgggaggaacaaaaagaagcttaaaagttagaaatggagtcgggcattggtggctcatgccattaatcccagcacttgggaggcagaggcaggcagattgctgtgagttcgaggccagcctggtctccagagcgagtgccaggataggctccaaagctacacaaagaaaccctgtctcaaaaaaccaaaaaaagaaaaaagaaaaaaagaaagaaagaaagaaagaaagaattaaaaatgggccctgcatggtggcacatgcctggtgctgcatgcctttgttcctattcctagcacttgggaggcagaggcaggtggatctctgtgagttcaaagccagcctgatatacagagcaagttccagggcagccagggctgttacacagagaaaccctgtcttggaaaaccaaaaaaccaaaagaaaagaaaaaggaaaaaagtcagaaatggaaaaaaaaaaattaggaaggagacttagggaatgtaaaaccatacaagctcaggaaccaaatcagacacagggaacacaactttcccccaaatctaccaacctgcaatcaccattgaagcttcagcttctacattctcctgtttccaagggcccttgttgaactccttctctcgaagagacacctcatatgttttcacatgccgcccctgaggatccttgggtggaaagggtggaatggttagctgctaaggtgacccagactgtaggggtatttaagggacaagccaccaccacccaggatttaataatcctgtcacactaaccttcctgtccttatctgtcaagatactgacagtcacctgctgagcctgtgattaatttctgagcagactgcagggtctaagatgtgctgtttctaataattcaagcaaccagcaaagtttaaatggaaaactgaacctgccacactgtaacacatagctgagagatacaccctgggactgtattgtaagctcttcatttgctgtcaaggagagacactacagctaaatctaggagatcaagaattgttttgacaattccttttcccccatttttttatgtgatgcacatacacatgtgtacaagtaaatgtggaggtccaaggctgatgttgggaaacagccttgactgcttttacctcattcattgagacagggtctctcaatcaaacctagaccatgcctatgtagccagtcttgccagccagattgcttctagagagcccctgtctccgccttctaaggctggaattacaggcaggttgccacacccaccagtcctttccaagggttctggggataagaactctggtctttttgcttacacagaaagctctttaaccactgagccatctacccagaccctgttttacacaattcttaaaagtattctgaagaggtgaccgcagagacaatagaacttattgctcccttaaaggtagtcaaaaatgcttcagtcccgccactgtcaactccatcttcctctcctttttctgaatcgtgactcttcccctccttttttggaatcatgactcacatcagtcttggggctgccaaagtcacctttaagaggctaaagagcaggggagaaaacgacattcagccaacagaagatggcttcaatcaagctcagaccaaagtctaagaaaccatggaaggaatttaatcacgtgtttcaaggcaaggagcacatctcagccattgtgacagccggtgaagtgcttagctggggcacctttcacacagcaggtgcttagttagtattcaccaaattcaactgttggcataaaccagttacttttggttgataaaacttttccatcaacaagtagggaaagacctatcttcacaaaagttcaagtgaagacggatttgggcctctgagacacagagaaatgaagagcattcacaactggcatccctggcctggaaacagacagagccagagccagagccagagccagagccagccccttgtagtcagcaccattgttttaataacctgattatttacaaaacggaaaaaagaagaaaaattttaaagttttttttttaatttcagctgatagctaataagataaataaaattatcctcaactagttccagcttttttctaccttatgttaatcagtctcaggactatagcatttatggggataccacatttccattactctgcagagctatctatgagtgttctcaggcacacatactctaccattctatatggaagtgaaaaatcattcctttctgtcatttattcgaccataggcaagtaacctgacctcatacagcctagtcctttgttaaaggctgagattttaccaagatgttggcatgttagtctggctctctgtgccccacccccactaacaaatctgaactagagaacagctgcccaggatcagctctgctaaaattttaggcactgactaaaatagaagtcaagagccagcaagtcaccagaaagtgagtgctagacaaaacacaaacctctttcaaagactaaagtaaggcactacaccaaggtattttctcttggcttgtaaaggcaagttctggatcatttttctgcagctaagtttttataatcctctagcaagctggtaagagattcaaacaaaggataaactaggtcactctataaaatccccaaggcctacaactggagtataatctcaggattaaaacctgctataaagccagcagcatttcctacccccaaacaagtactagtagcatcacccaaaaaaagcaaaaaaggaaaaaattctgactcatattaactgttttgttcaaaatgttttagaaaataggcaacatttctccctacccttctaccaaatccagcagacattcctttggcaaaaatcccactcccatcattccaaaccagtttctccctcagatcctgtacctggtagacaaagcaaatggtaggtgcttgacaaccatacaggaacttcacatcaatgacatgcaattcctctaagcggatgttaaaggccttgagctctttattgtctctgtctagaggaatgaccttgaaaaggccatcgtagagtcgcaggccaatcattcggcactcagggtcaatgataccaatgatgccagtctctgaggggcgaccaatacggtcctgtggtggggggaaaagctggaattagaaacagaaaatactgggtgcagtgctttcccaggcagataagaccacccgacatgccaggaagcccaaacatcacatttgtttttcccatgagtggctaagtgaattattcactttcccttcaactatcaaaacaattcaagccatgtgggcctttctcgttttttctgatcacatagtatgatgccctgacagttcactcttcatcactgaatcacaacagtgctaccagaaaaaccgatcagcctgaagtagccacctcacctggacattgccatgggctcttgtaatgatatcaatgctttcaccactctgcttatactccaggatacaggcattgtacttagcagtcaagatgaacaacagatctttactctccccctgaaatccaacattaaagcatcaaaagagttctttcaaaacaggaacaacctgttcagccttttaaacattctttaagcatgctaaacttctgaagaactttccaaattctactctccctacagagaaaatactccgagagtctgtaacatgtactaaagctcgtacatgccctaaggggatgtacaaaaggccagaactgaagctcgtaaacatctagtccttgctatcacagctctccatctctctgctccataagcaaggtactcatttattttaatcttaaattcatctcactctattcagttctcttttttttggggggggggttcgagacagggtttctctgtattgctttggaggttgtcctggaactcgctctgtagaccaggctggcctagaactcagagatccgactgtctctgcctcctgagtgctgggattaaaggcatgtgactccaacgcctgactctattcaaattcttaaagaagaatttgcataagtctaagcatatggagagaaaaatctgtagtaataacaatgaaagctacaatagtaaactcttactaacatagtcctcaaaaacattcctgttgctacaatagctctaattgtaatggtgaaactgttaagatagccggatataaggctgggcggtggtggcgcaccccttactctgcactggaggccagcctagtctacagagtgagttccagggcagccagggtacacagagaccctgtctcagaaaacaaaaaaggaaaccaacttgttaaataaatctccctctataagaagcttgtaaaagactaccattcccaaagaaaagcgtttctctacttaagtcttcacccatcccaaggaatcatataaaacacgcaactaagtctaccaagtaggaacaacacttaccttgggcctgaaaagctccatgactgcaatcttcccatacatgcccacctctttgactggccgaaggccctccgcagtgaccacatagatctctaatcttgtgtttttagcaatcaacaggttcagatcctccgcagaagtaaagtgtcctgaaataagagagcctctaacttttgaagctggagaatgaatggctctttctggtacctcacctcatcgccaaacacagcacctcaatgtgtcacttcacacattcaacaaggctacattctcaatcaggctttaaaaaaatgtactgtatactgggcaacagcctgtccttcaacagattatgaacaggaaaacccttctgatgatcctgttgggttttcctttctaaatcaagaacagaagactgtaattgaagttgatggagaaagtgtgtgtcttcttgagttcccatccaaaggctcccagaactttcaccagaaagataaagcaaagaaaaacttaagggctttctgtgttgtctacacacccctttgcctcccaagcaatctaccaatacaacgcttagacctctgtagctttctaaacaagaaacttttgttctgaaatcacgattagtatttacataaatacacgagtttgagggctgaacattcaactgaaaatatgagttcaggatgaatgttctttggttgggggatgtgattgcccgtaaagagccacgcacacaaacaaggcaaagcctgcacaccgaacggccaaccaaaccttgttctccagcagcgccctcgagtaaacaacacccccaggcaaaagggtgggtctggagaaggccgctcaccctcttgaggggagaagagaggtgcagaaataactcaaattcctccacctcctgcacacccaccggaaaattgtggcccctaaacccccatcatcgtctcgcctttcccctgaccacatgaggccagtttcgaggctcaatcaaccatgcacacacagctcatactttgctctctgtcccaccaggcctgggccggtcctcaaagctaagtgacctcctaggagcaaaaaggaccctcaatagcagcttccgctgcctaaaaggcgcgtggtgaaacagctcctttgaggccgcgagctgagagggacgttccgcggctgcctgcgccttccattcccggggcccaagtcttgctcctgccgtgcccgggccgccagcctccctaagcccgggttccctccctcgccggggtctccggccggggcagcctcaccggtcacacagccgttcactgcggtaggcttctgcgccgttacgacgtagttgtacgacatgttgaggccttgggccggcccgtggggagcctagagcgacgacagaaagatgggcacgagagaagagacagggaacccccaccctcacacagccaactccgtggccactgcctccacccctgagacacgttgcaggccagagaggccgggcgcggaggatcacgggacggcctcacctggcctcttggaggacttacggagcccgaggcggccaaccaagcgagaccccgcccccgatgccccgcccttcccttaccgccagaggccgcagtacccggatgagagcgacagttagggtacgcagatgggaacaggcccccccaccccccatcccgtgccctcagagcccatctgctggctccccttcccttcctcagattctgcctccttccctcccccatagttctaggagtcctcgtggctgttttccccttttggaactggaagggccgcggaggactagaaagggaagagaggtgacaaagacctgtacacatcccagactagaaccgtgcttccctttgcttaactcttccatgccatcaactgactttagaacaaaggttcccccccccaccccccgcctcacctggaaggcggggagagggggggtcctgggtgctcacttctcttaatttcttcggaagagaaagggctccttacttaaatcgcttgccagcactgttagtgtccttactgcggtataaattctgaacgcaaacacaacactggaatttcacagcaagagtcttaatgacccaggtgttctgtgcagtcagtcagcactacagatctaagccccaggcttcatcagaaagcccccacgcccccgcccccacaaggagcagctgaggctggaagcatctgcaaaatgcccgagagaagctaactccctgttttatagatgaggctgaggcctaaggggatcagtttaactaaaagtccccctagtaagttgaagcagagtggatggagcttggtctagaccaacaacaacactgctaaacccaggtctaactgaagagtgatttatacctcagttttccccagctgggactccgcctgtctttggagaactggaccatcagaggcaacattaattaagatctgtaataagactaggtatgggctcaagtcctgcctcttaccccttcaatcttggacaactcactagagcttccagtccttattccagaataaggtcacagggctggcttgatcctggtgtagccagccagcaaggtgaagatctttgtacattttctccattagtgatagccatgtaagatatgaagttactctgtgggtaactttgccccttgatgaggaagtggctgctgttcccaggcagagaggcaaccccatgcccaacatgaattaatctgtcttcaggccaagtgtggaggtgaaccttggtcaatcccatgctgctctccatccctagcccacgtactagaatttggacttggatcaaagtctgaggcagctccctaattcctaaggcacaggaggcatgattgtgtcaattggctgccggtgccttctggagctaaccctcactactcctgcaggtgctgcctctgcctccacttcagacgaggtagcactcaggattggccaccctgccaacagctaggagcagaagtgtgagctcaacttgtttcagagcttccctaccatggtgagtccttgggggggtgtggaagtggggagcaccatagagggaggattatggggatcccccatctgaacaccctgaatctccctgttccccacttgaaatgctgctgcctcctggggttcagaggtccagtttcagctgtatctccaggcttgatccctgttccctttcctgcaggccactgggccaagtcaagtctgaggcactctgaaacccctaaggctaggatctgtcatgcatttagatcaaaacaagttactttgtgtgtaataagtcactttactagtcaaggagggagccaggaaggatgataatctggtgcctgctcctcagtccaggcatgtgtgggctgttcccagaatggagagatgctgtatgggaggctcacggtgcccctgggctttgctttaaaactgatcttgagcagacctgggttcaggtttcagcctaacccctgccactgtgttactactgtgtagaaggcttgacttctctgaacctctcctctcccacacccccatctgcagtatggtagattaagacctgctaccatgttgctgggtagtgtggatcagactagagtcctagtggcctcacacagtacctccccttttttttgcttttccttcccctggggttcctgagaaacaggaatggtctggtgcggggtgattgggactctctggaagggtggtggtgctggaggctaggctcggagttgacaccggtacacactagatgtagtgttccctctttccctgcactgtgcctttctcagtgtctgcttcagcaacttgggaaagcagcatgtggctgggagaaaccaggcagatgtaggcacttgctggctgtgtgactttgagcacagtcatttgtcgtcgtcgtgcttcagtttcctctttgtgctgacctttcctccaaaggattattggggaaactaaattagacatgttatctagtacttagaaatagtctggctcataatgttaaagaaacggagcctatcttactctgcttgctgcctactgacctggactactcccctcatcctgaagcaggtgtaaaggccttggcccatgttaaatggaggaaagacatcagtgctgtaggaatactgggtactggcaggctcagaaaggaggcaggaagtgcactttgctgggagctgggttagcttcagaccactaggtggcgcccgcagcctcctcagggtccactttgagttccactttgcctcctgagaacaaaggcagggtgctgcttcccaacccacaaccgttgtttagctagctccagcttttcaaagcctgttcacaaaagggactgtaggtcctttctagtgagcttttcccatggcactggtacaagctgtactctggtaaattgccgtttcacagaggaagaattttgagctcagaatagatgtttcttccctgagttctcatagtttatgacagagaggagtgggatttgatccctagtcccagtgactatagagcctgagctctcaactactgtagtcccacagagctcccttttggctgcaagccctgtaaagactcagctgaacccaaaggtattctctggagttcttaggccagcctttgtacaaccttcctcctgagtatgccctagcttatcacagtgcaactgtcctggcaggaaaaagacattctaaagagagactttcaccccgttcagatgtaggctgtcagactgttaaaacaatgctcccccacctacccacccactcacccaagaaattggaatctcatgctgggggaagataaagacagaagccttggtgctaaccaggagaaactgccagaaagagatttcacacagttctgacagtgtttcagaccacctagcaagaaaaactagagcagagagtgatgggcagagccacaccttgaccagggatgattaggctttttgtttaagagttgttttattgttgttgttttgttttttgttagttttggtttttgttaagttagtttttcaagacagggtttctctgtatagcccctggctgtcctggaacttgcactgtagaccaggctgaattcgagatccacctgcctctgcctcctgcattctgggatcaaagctgtgtgccaccttgttccagtttttaatgtgtctgggattcatgggtctcatgtaactcaggctggcctcaaactctgtatgtagctgttgcaaaccttgaactccttgaccctccacctctcaaatgctgggattacaggcatgtgctaccacacccagctagaactgctaaagtaaacatacctccttctctctatttaaacctaaacctcatgtcagtgccctggagatggacctggagaaagggagtgtcactggacctctttatttgctcctcttcccattgaatacacatcgaataaatctcctttcactgctctttcctgttctttctttaattggcctattgaggacacgtagatgagactagtttgttaggggtagtagagctgaggctttgatcccgcctcttcctgccagccccgtgtcagttgggttattctgatgcttcctggagctactgtactatcacacatctccatgtcttggcttatgtttccttctgcccagaatagccccctcttcccagtgcctacatgtcttctctttattcttcatgaagacttcctgaatgccttcaggagattaaggcccctttcttctgtgctcccttgcacgtgtgtgtccctctcacatagcatgtgaaaatgacattcatgttcccatggagcgcaagaatagcattctactctctgtgactatgcagggcctagcactgtgcattgtcacccttcatgagaggtccagctggagcacatgaagcccagttgtagcatcagataggtgtggagcctgcccaggcccttcccccatcacaggagcctctgcctaaaacttacctcctcctctgacagaaacagacagggccccaattgcattatttttttcctagtgaggacgccaactcctcagttactttacatcgaagctgtttttcaggatagagagaaaccatggtgcaaaagcttataagttaagcactaaataaaaagttgaaaattgccaggcagtggtggcacccacctttgatcccagcactcgggaggcagatctctgtgagtccagcctggtctacagagtgagttccaggacagctagggcttttctacagagaaaccctgtctaaaaaaaaaaaaaaaaaaaaaaaaaaagttgaaaattgagaagtcacagacacatccacctggtaataaaacaattcaagacacattgtgtccttggaattcctaagtggcacctgtaattctttccccctagcatgagattcctggggaaatgtggctgaccacactctgaacctcctcttgttcctcctccacagacctccaagaagctggtgaactctgtggaagggtgtgctgatgatgctctttctgggttagtggcctgtaaccctaacctgcagctcctgcaagggcaccgtgtggccctacgttctgacctggacagcctcaaaggccgggttgcacttctttcaggtggaggttcaggccatgagcctgcccatgccggtgagtatcttgtgttgattgtgagaggtactggccagagcagagcagactcctgagagaccctttgtgctagtatgaggtaccaggcaagagttgtgaggccagagttaagaatgggcccagtctccatcctcccactccaagatgtcccaaggacagtcacagcctgtctctgtatctgaattcttttatctctagaaatgcagggttgagccagatagtctctgaggctctcccagcctcaagaattggtgatggcaaaagtctttcttgccttttcttctagtcctgctgacccagcacctccaagaaattttcctgactctgccagtccaaagtgggacccatcttttgcatccctaccattccttttcccacacttgaaccatcctagctggtttcctgtttgatgccagggattgagccctcattaggagcccctacagcaggtgtcagctgcacctttcctgtccaccttgggattccatttattcattcaacacatgttagcaagcctactgtacacctggccctgtacagagtacacctgtgaagcaggcaagatcgatcctgcccttatggaacttttatgccccactccaagaagacagatgtgagtaagagtagttcagagaaccttaagggatataacagacaattgaatatacagtgaggggcaggagtgatgactcaactcttaaaagcatttgttgctcttgcagaagacctgagttcagttcccagcacccacatggctactcacaaccatctgtaactcgtttcaggggatccactgctctcttctgacctccatgggcaccaggcacacacatggtaccacagtgcacatacatacacacttgcaaaacattcggtaaatctgtttttcaaaagctttatgtaaaaagaagaacaggaagaaggccagaaaatgatgggaggagacagagttcttcagggtgagagtcaggggaagcccctccaagatgactcccatggaggcgttggccgtagcacaagcacacaataggacttacccaaacatggagctcaggcatgtgggaaacttcagggataacaggtatagactctacccagcatcccatttttctccatctccaggttttatcgggaagggaatgctgacaggggtcattgcaggatccgtgttcgcttctccagctgtgggcagcatcctggcagccattagagctgtggcccaagcaggcacaggtcaggcttgcctatgggagaaaatgctgtgtgggggtgctttgggggtgggtgagggccaggctaatgataccatgctactggttctgcagcgggcaccctcctcatcgtgaagaactacactggggatcgactcaactttggatttgccatggaacaagccaaggctgagggcatctctgtggagatggtggtaattggggatgacagtgccttcactgtcctgaagaaggcaggccgtcgtggcctgtgcggcacagtgcttatccacaaggttagcctccccaccctgggacactgaggaccagccatttctttaccctgacctaccaagtccccatcattgcttcagccattaggcccagaatgcaggcattcttctagatcagttccctttccttcccctccccactcctagtcagttgccccttccttgtgtttctcccagtgcagcacgggtggtcctcatatcctgccctaactgccttcacagtgcctcatgcctcatggctcttggtcttctaactgcactcaacttctcactgggctcccctatttgctttttgccctcctgacttgccagtctgttgcccacactacccctagggttgttttgttttgttttgttttgtttttaaatacatattgaccagcactcagaaggctaagactggaagattttggatttgaggctagcttagacaacatagtgagaccctgtgtcaaaacaacaaaaaaaaatgtgtatatgcccaattttcatttcactgagagcatcttgggttcccatagtcagctcaagcccctgattgggggtgcccaccacacactttttatttatttgaggaccggagaggtggttcagcagttagtagcactggctgctcctgcaggggacctgggatcagttcccatctcgcgcacatggtaggtcacaactgtctgtaactccacttccataggaggccagaagagggtgttggatcccctagaactggagttatagacacttgtgagctgccatatgggcgctgggaaccaaacctggatcccctgcaagagcagccagtgcttttaagcagtgagctgcctccctagcctctccatcaccatactccgccccatctcattaactcctggcttcacggcccagcaccctcccccccccccttatgctctataaacatcaggtccttctctgtatctgttgggctggaactcacctctgtggctttatgcatgccatatctgtccctgcaaaatcctttctttggtcatccttctgtgacttggctcattcctgacattccgtagagaccaatggtgctccatgtggtactctccctgattctctcagcaccctgagccaccagaaagcctttctcaggttctctcagcctcctgatatgtgtgccatcttgcattaattttcagtgtgtgtctcttgcttctcttcctcagactttgattcagtcttcctttgttctttccagcttagtagatccttggtgaaaactgagtaggaggatgaatgaaagaatggaataagagtaaatcgagccaggcattgatgtcacacgcctttaatcccagcacttgggaggcagaggcaggtggatctctgtgagttcaaggccagcctggtctccagagcaagtgccaggataggctccaaagccacacagagaaaccctgtctcaaaaaacaaaaacaaaacaaaacaaaacaaaaaaagagtaaatggagctgaagtgtatgctatagaagaaaggagctctaagagtcaggaaactgatcagcaacaggctgtgtgacattgaacaaatctcccccttctctaggctcatttctctctttttaaagtccatttcagctccactagactacagtggagagggagagaggaggaggaggagaggagaggtgaggagagagaggagagagagagagagagataatatgtgacaatatgtgtatatattttgctgtgaatgggctttatgcatgccaggcaagccttctaccatggatccacacccccatccccaaacaaaaactcttgaagactcccagcaggtatgttgtaaaaaaggagagaacattcttctaccctaaatgtgatggaccacatttagtgtagaaatcctgagcttctccctcccaacaagtaagttcttcccagcctctcttctgctctcaatgatccagtgacccctccacccactatcctctctatctttctctctgggtggctacaggtggcaggtgctctggctgaggaaggtgtggggctggaggagatcgcaaatcgggtgaacgtggtcgccaaggccatgggtgagtgccagccccaaggatgggaagatgtggccaacatggggactcagagcaggctcctatcagagaagccttttcatgtttcccttggggttgggggagggtcccctggggataccctggagcctgggagccgtggataccagagtttggactctgttcatcagtaaggtgaggcgttgggcagcatgttcatagaagatgcctatagccaggcttccacagcgttgctgctgccatcctggcacctgctacaacagcagaaccacaatctcttccatgcttcatttttcctaggtacccttgggataagcttgtcctcctgtagcgtccctggctccaaacccacctttgagctggcagctgatgaagtggaattaggcctgggtaagactgtggcaactgtgcccctgccatgcctgttctttgcattgagttttgtctacctctaaggtcctggagtcgtctgcttggtcctccctgcttacttgatgtcccctaggtggtctctagattcataggtgagcacgtgaggcatagcctagaccaacctgcctgacttctatccactttgccatctgtgcccaggctctggacacatagagtgccatgctcctcctacctcatttttacccacatcatcccatgtactgctcgagccccaatgtgtagcccttttggtccaaaggacaccttgtctgtgactgacatgttccacttctccccgtgtgtttctaacacaataggcattagtgtcctgtggcctctgtgacatcccagctagctccactgccacaccacatgctaccttgtttttcattattctttcattttctacccagtgtccacactcattgtgcctagtcttgtgctgaacactttgtgtgtcattgataagaacatggtaagagaatcagtaggctgtgagctggccaataatgaccaaatctctccacagggatccatggagaagctggcgttcagcggataaaggtaaatagactccttgctcagcccagtccagcctgaggcctcccagaaacagctcactcctgcttcttctgacagatggcacctgctgatcagattgtgactcttatgcttgaccacatgacaaatacctccaatgtatcccatgtgtctgtacagtcaggtgagtagcctgtagttcccaatctctgtgccctttctgcccctctgcacagaggccaccaaagtctcactgagggtgtcatatctatccacaggctcttcagtggtgctgatagtcaacaatctgggtggcctgtctttcctggaactgggcatcatagctgatgctgctattcgcttgttgggtgagcccattttctttttctttctttttttttttttctttctttctttctttttttttttgaaacaatgtctcactatgtagacctggcttggctggcctgaactcactatatagtccagactggccttgagctcacagatgtcctcctgtttctgtctccatgcctacctcccttatccctttgaacccagtttaaatctaggcataagaaaagcagctgacgatgggtgttggtggcgcacacctttaatcccagcactcgggaggcagaggcaggcagatctctgtgagttcgaggccaacctgatctccagagcgagtgccaggataggctccaaagctacacagagaaaccctgtctcgaaaaacaaaaaaaaaaaaaaaaaaaaaaaaaaaagaaaagaaaagcagctgaggctgtgtcctgtgatggcccagaacatcagctgaacagccacaagcttgagttaaattgttacttttgcctctaaactgctggggttttgagtctgggagtaataacagcaatacctgccttaggggtggctatgagaattaaatgtaaggaagctacctggtgcctgctaagagctcaggaggggatacctccaaggaatgtggcaatggactgtcacaatgtgtaatgggctgtcactgagggatgctctgaggaaatcaggtcatttccctactcatcacaggcctcaatctacaaggaccttgttttgtttttggtttctttttaagatgctctgtggtagttccctttcccactcacaggcttctgtgcttggcattgcagaagaacgtggggtgaaggttgcccgtgccctcgtgggtaccttcatgtctgcactggagatgtctggtgtttcccttaccctgatgcttgtggataaccccctgctgaagctgataggtaagagaggcctggagcctaaaggtattgctagagggaaccatcatccatccacctgctctagtatagagaccacatagggctgatggtgacagtctggactctaggcctgtgaagagctctgctctttctggctttttggccttcagctctcattcaactttggaaagttggtattagtgacatcctcacatctgccttaccctctccccagggacatgctctgcccccactcagtatgcagtcgacactcatatgttcttcctgatttggaccgccttcttgcagacagcttagggaagcagtcttcagggccaggtggggagtccaggccccacttgatcttgtctgaaaaagttatgtggctgcctctagatgctgaaactactgcaacagcctggcctcacatggccaaggtctctgtgactgggcggaatcggatcagagcagctcccacagagcctccagaggtcactgaggccactgcagcaggaggtactaggccttgctgatggagaggggcaagagtctttggggtgtacagggaccttgcttgatacccatacttcccgcactggtcaagtttggcaatgagaaggtccagccaggcttctgtgtcctgacctccctttctaggtatagcatcaaagcagacaatgcttgtgctggagcgagtgtgcaccaccctgctcggactggaggagcacctgaatgccttggatcgggctgctggtgacggggattgtggccatacccatagccgggctgccaaaggttggcctctatggggtgctcaagggctaatatggcatactagctcttagatttggacattccatgaaacaaattccagcacatttaggggctttcatggagttactgccttccttcaccaagtgaggccatttggcacacccctcagcctatcttcccaaaagaaaggagtttcccacactacaaatggaatagtaatcacagaaagagaccattctgctgcccttagagctctcagatgctcacaacacaaaaaaagcccttgtccagccatttaagaaagtggtggcacattcctttaatcccagcactcgggaggcagaggcaatcagatctcttaaattcaaggccagcctggtctacagagtgagttccaggacaaccagggatatattgagaaaccctgtcttgaaaaatggatggatggatggatggatggatggatggatggatggatggatggatggatggatgggatagatggatggatggatgatagatgcatgcaggacatacctcaagccaagcaccactcccatatctatggttacaaaagtgcacaaggtcaggcaatggtggctcatgaggatttccaggccaacttagggtaatgggaaagagaagagaaaaaaagcaggcagaaagcacatccctcagtaaataaaaccaatcaggacaacactagcagagaccagagagagaaaaggaagtggatagtacctctgaagggccacctgtctctctacttgcagccatccagggctggctaaaggagggcccagccctagccagccctgcccaggtactttccaaactgtctgtcctgctgctggagaagatgggaggctcatctggggcggtaagtagaagtaggccctggaaggacagactgatggggagggatgcaggtttggctgggtgctggccagctccatgtactcagcattctggtcttcttcagctctatggcctgttcctgactgcagctgcccagcctcttaaagccaagactgacctcccagcctggtctgctgccatggatgccggcctggaggccatgcagaagtgagccagggccctgtgttgtaacaccaggggtgtgctggggaggtggttgatagattctccctgctcccaggcagactctgtcctcacagctaaagtaaccatcttgctcattctgtcaggtatggaaaggctgcaccaggagacaggacaatggtgtgtactcagagtgtagctccccttccccttttgagcccacaagccctacagcagggcttcttctcaatccccctctctctgaccttgttcagctggattctctgtgggcagcaggacaggagctccaagcctggaagagcccaggagccagtgtcctcccagtcctgacgaaagcagtcaaggtgagtaaggctcggctggacaatcaaggagcctccaagctccaatcactaggtggccttaagcaagttaataatggcctttcccaacttttttccacctgtataaagcaggggtgaacacctatctcagaaagtgttatacggctagggagatacattaagcctagcctagtatctgagctgaggctcagcaaataggggccccattccttgctagaagtagatgggaggtgaccttccactgagtgatggcacagatattgctgacagaacaggatgaagggtccaggctcagggtttcagggcctagtgggaaaggaaaggcctagggtcgtgtacttaaacctactcccatacttcctcagagtgctgaagctgcagccgaggccaccaagaacatgcaagctggtgctggaagagctagttacatcagttctgcacgactagatcagccagaccctggagcagtagcagttgctgccatcttccgtgccatcctggaggtcttgcagacacagggagcatgactgcctttttcctcctcatctcttctccctgttccattcctcttgccttcagatggtcaccttacctctcgctcaccctcgctcccatcctcttcgtgaagtaggatatcctccagcacacctctggaactgttccataaacatagtgtctggctgagtgaatcatgtgccccaccagcaccctctttccctcctccagaagaggagtccctcaggtcatgttcaccccactccaaccagttatgaatgtcagtgataaggcttttccagagtacagcacagcccctaactgggtatacccatttggtttcaaggcctcttcctctagaagacctcctatacctagtcagtgtatgacggaaagccaataaaacccattgaagccacacgtggctgcctcatctttgagactttagccctggttatcaatgaccatgacccatctcttggcaggcagttcatcacctgtgccccagacaagttctgctctgctgggatggttccatggggactcccctttcctatcctagcacataccataccaatgcatgccagattgacacaaagtctttcctctgcaccagatcaattgattcttcagaaattaatgggcattgggcccccagaagaaatggactcactgtgttttgaggctatggtatagttcagaaacttcagtcatacaggcccaaggtctctctagagcagtggttctcaaccttcttaatgctgcaactctttaatacaggtcctcatgttgcagtgatcccgaccataagattatttccattgctacttcataactgtaattttgctgttatgaatcataatgtaaatatttgtggagttagaggtttgccaaaggggtcatgatgcactgctctagagcagtcattgcctatgctctgaccagttgaaagactgatgcctgagacaacaaacccacacagctcacaccaggcatgacatcctcagtgtagagaagtgattcaaggcactggcaggtcatatccatgtaaagtctggttccgttttaaactaactatgggaactcatgcccatatttggccagttgagatctataaaattcaatgatgcccatctaaggccatcaagatggctcagtaggtagtagcctgaaggcctaacaacttgaatttgatcaccaggtcccattaagtggcaggagataaagttgtcttctggcctccacatgtgctgtgggatgagcatgcctacacacacaaaataatatttttattttttcagaatggtgaccatcacatggacaagaagactcaggtgaggattaggatcctgggcagtgtggtgttctagtgctgtcaccagaacaagcgttagcactgctgtcagctattctcccttcctatagctagtcatactaagaaagggaccccatcatctgtgttctcagattaggcactgggactctttggcctctagacctagggtctcctgtcagtcggctccatcagaaagaagtccctggcaacaaagtagttgtcatgcacagacatgtggccaacagagaggaaaaagttggcatcaaacgatgacttgtggatcccaactctgccatcaaccagcagagtgacatcaggtcactctacttacttgtccaccttcactcctttttgagtctctttttccagactttaaggtagggaacaccccttccctaatgaaaggagtgtgtgtcttaaagcctttcattatgaaggacacccactcaaatttaaatagtttgcaattccaggaatacaatcatggatttctggttggccctcctctgcatctgtaagggtcgtgtgtcctgaagcctttgtaaattgccaaaactctcacttgagtacattgtcatgtcatcaaagacgatttctgtgttccaacagaactcctatgcttgaaactttatccctaatgtgatggaactaagaggcagagccttgagcccagcctggtagcataccctttagtctgagcactctggaggcagaggcaggtagatttctatgagtttgaggccaacttggtctacataacaagttccaggccagccagggctccatagtgaaacagtctcaaaaataacaaaaaataacaacaaaagaggtaggacctttataagtgattagcggtgagggtgggacccttctgaatgggatacaccatcatttataagggtctggaaacaacttatactctgcaccatgtgaagccacagtatgaagatagtggggagaggccctcaccagacatgtgttgttgccttcatcttggacttgtagcctcccaaagtatgagaaataagtggttttgtttaaactatccaatctgaacaaaagacacctttagtgtttaaaaacacatttaataaaaatcagattcatgaagagtagaatacccactcgtgagtaaaacagggtaactggtcatgtccaaggtgccccgcagtatcaatggtgcgcaggcttcatttagtcaggaagtccatggcagccctcctgccaacttctggcaacagggttgaagttcagcctgatcactatctgcagggagtcaggaacccaactcctcctactggtctgctaagtacagcagtctgcagggaccttgcagggcttatctgagaaggtatgaagtgccacaggctaatacaaagcagaggggcaagattcctcccttctacccagtttctattcaggagaagagcaaagctcacactctggcataccatggagggagagtgggtggccttgtggggggcgggggtgggatggggggataaaagcacccagtactcagtagggaacacctctgaagtcagcagtggctccctgaactctgcccagcaaatttcgtcataatgctggtttcaatctcatagtgggctggaccctgtcagggaagagcatcactagaggaggcaggaaagcccatacccacaaggggacagaaaggaaggtcacagaaacctctgttactcatcacttgggactctagggtcaggttctctgttcatgggagaacagtttaccagggctcatagggttgcctgagggggacaggcatgtaagtcacagggaaagggcgggatccaggcagcagctgaagcagcaactagaagagggggagccacatagtcacaatacacacaacacagtatatcaaagtgaacagagcagctcagagtgaccagcacctgactcctgcaaagccttttcctgctgctgctgtcctattaggacctcccagcatctctgcccacccaaatccacacccagggcagagcaaaggaagcctgcctaatggacacaaatgctcccacagacagcagactttctaccttgcctttctacatttgagcctctgctttggcttctaccacatccctaggagtggtgaggagaaagcagcccgttcttcagaccagcagaagagacatgaatgaccaaggcaaggaggcccttgaaaaatgccaagtcaaagccatggagaaaagcagattgacagcaagcagctggagagagcaagccaggaactggagtagcaagtttgtctctggcccaagagaagttggttgctgaaatgagccaggagctccaagtacagaagcgcttctgagggagcagagactgcaccaccgactgttcctgggagcccctgcccgcttcactccctgtcatgcaacaggggctggaaagaaggaagatgcacagggattaaagacataaccttgaaagagcccctgagcttcaggaggcacaccaggcctgagctgctcagatagaccctccccctgcagggtgaacccagcccagccaccagatctttcagggaagcccaaaagtccctgcaactagttcatagcacatcttcccacatctgcagaagactcagtgggcaagcataggcaaatcctgctttaagcatctgatgtgtcactaagcactggtcccctagtctagacacagagctggcaaaacttcaccaggctcaagcctttcattgtgtcatctcacaaagccaaggactcttgcaggggaggggaagcttgggaagtcactcccaggcttggctgctctgatgccagagtccccatctgccactcaatctccaccttcaagctgcttggctttccacctaactataggaccattcttctcagctagctgcaagtccttcatgggtccttctctagatctggccttaccccacctagagtgggagacaagcagccatacctgtctgtcagtcagagctcctggatctggacgtttccatggtgaagccagaagaacatagagaaccagtaggccaaaagccaccaccaagatcccagtgctgttggcaaagactgcctcactaggcaggctggaatagggtttggtgccatttttcctgaaaatgacaaaataatgtaggtcattgagagaattttctaactttttttttttcctaacagaagactagattcctatgacatggatttaatatacttcctaagtccctaccacaatgacagagaagaactttgtaatgcttttcccatgagaaaaacaaagacactagtgaaatgaacctacccacatttacataaccagtacatagcacaaccaagatctaaacctcaaggctgatttcatttgctgttcactttaccatactgcctcaaaacccagaacaacagtggttagactcacaggccttggaggcagatcgcctaactcattcccacttctgccattttctggctgtgtgctcttaggtaagtttttctgtgcctcactacactttttttttttttttttaaacaaggtctcacaatggagacctgcctggcttgaactcactatgtaaaccaagctggccttgaactcacaagatctgcccacctgtggtgctaggattaccaccatgcctaggtcattacactcttgtgacagcagcaccaaatgttgtaggtgcttgagaggattaaaactggggtactttgagcaacttctgacaaacagtgggtactttatcacttgatgctcagtaagtactgccagggttaccaatttcaacctaaacactgtcaccttccagatcagaatggactcaagcccagaggctggcctctgctggctgagtcctgtgattataggatgcatctcctgaagcccctaccccctcccatatgccttagtgttagaggccccttagaacttacaaaacaaagataagcttctcattgatgccggaaataacagatgtgatggacagggaaaggatgcaggctccaaagcagacgtgcacaggtttcaggaggcttcgcagccactgaggtgcccagggcaggagaaagatggcaaagcccagggaccactgtggacacaagggaggaagtccctgaagctatttattgactataagttgtacccatctaccactcaatctaaccccatatcacatctatcactcctgctggccactgtcccctggcccttctttttcaactcaaacattgccaccatgcacagcctcaagcacacaccatacgtcactgtgatctgctcattcctattacacaagtgtatgaaagcaactagcaacttgtgtgtgaaaggcttgcagcagtgtactcagaaaacctagtcattcttgttagctttcaatgcctgccaggcctgggtcataaacaattcaagcacaggactggcactggaatactgaaatcactttgagaacagctctggttcaaagagggaagagtggagaaagcaggaaagagggtgctttggagtcagcatgacatgtgggatgacaaagtcaggagggatggccagtctaacaggtgtaaggaacaaagtaagggtaggaactccaactctcatggtcacttaaatagctgagtctacaaggtatgagggcagagagaatgttggagctgaggctggtgaagccacacccagaacccatggtacccacagggactcaggagagggcagaggacacctacctgacaggcgaagaagatgacagtgatgatgcccagccagctatgcagggaatagaggtgtgtgatttttgaatcattgtggaactgaaagacggcaaccaaccccacaacggtgaaggtgaaggccagcaggtgcagtgctgcatggagaactttccagggcagtttaggccctacccatgacatgggcaggcggtacaccagcgaggctgcaggagagaacaatcccagggcttggccacatcaccttacactcccctgatgtgaccccacataagtgtcaggacatcaactcttgtcctggttggtttcttgtcaacttgatgcaagctagttatctgagaagagggaatctcaattgagaaatcccctctcatcagattgcctataggcaagtctgtagggcatttactttgttaatgattgatatgggatggccaagttcactggaggtaatactatccctgggatggtggtcctagatggtataagaaagcagagatggagagatggttcaattgttaaccgcactggatgctcttccagaggacccagcacctacatgacagttcacagcctttgtaactccagtcccagggggatccaacaccctcttctggcctccacaggcactggatacacatagtgcacagacatacatgcagacaaaacaaccatacacacataataaagactaaaaagattaagaaaaaaagaaagaaagcagggtgagcaagcctgtaagtcactttcctccacagcctctgcttcacttcctgccccaacttctcttcacactggactaaaagtataaggtgaaacaaaccctttcttccccaggtttgcttttggtcatgctgttttatcacagcaatagaaaccctaactaagactactcagcatctgctaccttcctgttacttgtgggaggcagttggccaggaactaagacaagaagggccagttaaaatgggaggagcagtttcctgaactgtcctgtctcaatcccgagtgcagctttgtgggctgattagcactgtctttgcatggtctcaccacactgcatccacacagtcaaggttggttaagaatctaggcatagccgggtgatactggtctttaatcccagtactcaggaggcagaggcaaatggatctccctgttggggtagggtttgggggacaaaagaacccaggcatgaaagctgagggtgcagctcagcacctgtctatcgtgtggggagtcctgggttcagtttcattcccagtatcaccaaaaacaaaaagtaaaaatctaaagagctcaggcatagaggttcaaacctagcatctgctccttgcatgtttggcttcttctaagtctgtttcctcttctataaaagaagtgactacaaagcccacctcacaaacttgctctaagaacaaaatggacacctggcgatagtggcacatgcttttaatcccagcacttgaaaggcagaggcaggaggaactctgaatttgaggccagcctggttggtctacagaaagagttccaggacagccagaactgttatacagagaaaccctgtcttgaaaataaataaataaataaataaataaatggacagcatggaaagcaaacatggtagtacatgcctgtaatcccagcacccaaaaggctgagacagaaggactgctgtataggtcaaagccaggctgggctatatagtaagacccccatctaaaaaagaagaaaagggggtgtatatgaggatgagggatagctcagtgggtaaagtgtttgctgcatgagcatgaaggcctgagtttaatccccaaaacccatataaaaaatctgggcagggtaacacacacttgtaatcccagccctggggcagcagagacaggatgcctaggccagcctagcctaatcaactagtcccaggcctgtgaagaggtctgtctcaaaaaaaacaaaatggggttcacaagacaactcagaggtaaaagcacttgccacacaagcctaataacttcagtttgatccctggaatccacaggaaagagagaaccgactcctaaagttgttctctgacttccacatgcatgacatggcattcctatgctcatattcgcacacacagaaacaccaccaccaccaccacaccagaaataattaatataggaaagaattcaggttaaggtatagtggtgcatgcctttattcccagcacctgggaggtggatctctgcaagttcaaggccaacctggtctacagagagacttcaaggacagctaggctacacagtgagaccatgtcttaattgaaaaacaattttaaaagaaaaagaaaaatgtaaaggtacaaagtgcttaataatgaatgacacccaagactgtcctatagactttacatatgtgcacacatgtgtacatgcatatacatacaacatatatatcataaaaaagtcaagaaccagaggggatgatgtgtgatgtatacacggtaagcagattttgccaatgctatcatcattcccaccctacaaccagggttcacttcccatgttacaggacacagatttgaatgcatgggacaaagatggatcctcaactcaactgtaataaaagaggcttcaactccttgtattctagagcaggagtcaaaatgcaatgccaggccaaatctagcctgctgcctaattctgtgaataacattatattgggacacagttacattcatgtgttttatgtgctttccatgatgcaatggcagagctcagtaactgcaatacgtattataatcatgccattacaaagcctgaaaaaaactatggtctggtcctttacagaaagcttcactgaccctgtctctgagtatctgggaagttgtcccttcacattccacttcttcccccaaatggtagctggtcccagcaacaacccaattcaccccagtaagtgctgctctgctcaggcccctcacactgtgaacatattactcaccagctccatagagcaccaccatgccagagaccatgagcacagggtgccagttgaacatgtgcacactgccatcccaggcaaagccgccacgccaatactgcatccaataggtggtgaagaggatgcacaaggatcccaaggaccccaggaccatgcagaacaggtaaaaccgtcctgaagccattctgatcaagaactcctagaagaagcagaagtcacatgtcctagcttaaccatggtgaacctgcacagcagctaaaggaagtgacactgacctccctttatacctgtggtatggaatctttgcttcagttcccctgtccccagatggcctcaatgttgagtgagttaagctcacaatgaatgaggctccacccctgcacctggcagggcaccgatgtggagctctagtgagatggcaaggccctggactcacatcctgggttctgattagcctccctacacagaaccagaaagttaaaaattactgccacacccaacccagtagagacagatcaaaaccctaaatgcatagaccacacattcccaggtcctgggctccaacataaggcagcaagaccacaatctaaggggggtaaacacattctaggctgggtatacctccaacaaaatgactcggtgcaggggctggagaagtgggtcagcggataggatcactggctgttcttatagaggattgaggttcaattcccaacacctacatggtggttcctccagttccagggaatctaatgccttcttctagtagtttccatggacagacatgtgtgtgatacacaaacatatggtacatatccatatatatatatatatatatatatatatgtatgtatgtatgtatgtatgtatgtatgtatatatactgtttttcaagacagggtttctctgcacagccctggctgtcctggaactcactctgtagaccaggctggcattgaactcacagatctgcctgtccctgcctccaaagtgctgggattaaaggtgtgtgccaccaccacccagatatatatatatatatataatataatatatatatatatatattttaatgattgggtgtggaacatttgtagatggcaaaggttttttgatttgggactgtttcctgttgcatgttttgagcattcattttggtgaccaaaaggttttaggtatggccagacatggtggtacatgcctttaatctcagtactagggaggcagaggcaggcagatctctgagttagagcctgtctagtctacagagtgagttctaggccagcaaggactacacagagaaaccctgtcttgaaaaaccaacaagccaaccaaaaaaacaaaaaacacaaaaccaaacaaaaaccaaccaaccacagtaaaacaaacaaacaaacaaacaaaaaataaagccaaaccccaagttttaagtttcagaaccttctagacttttggctaggaagactcaatcactagcattatgtcacttttgtttgagaagatcttccttacagaggatgaattccatggggccaggtcttcaccccaggcccctccactgctctccttgaactaagggcaccccgtggctgtttctacacctgagacttacttctgctttcacttttctggggaaagtccagaggagagaagaggaagcaagaactcatggtctagaaagtaattatttttagatttctaccaggaaccaactcagctttcaggctttctctggtgaatatttaagtcacaagcagttattcttaaaaaccaggcaaggtgctatatttgtagctcagtgataggggcttgtttagtataagcaagtcatgagttagattcccagcgaccccccccccccccccgcaagtgggcaaaggtccagtcctgctctagtaacaggaagaatagccaatagtgtccaaggaggaatacccaaatcctcaccttcagacccaacagaaggctggcctggtctctgattttcacagactgagtacccagaggaaacacctaacactgcaagacttgttctctgaaaaaaaaaaaaagcatggcaataaaaactattaattgaacatcagctacaagcactagatactggcccacagttccacttactcctcttgataactctgtgaggactatcacccacccctatacatgaagaaactaaagctcagacaacctaagtatctagcaccaggactgagcaagtccacaggagcttcaaacctttgtctactttgatctaaggccttagacctttatccacgggttataagatcaagacaaaaaaatatgtaaggatattattgagactcaagtattatgacttcacatttactactatcatagaattagagagagaaagagagagagagagagagagagagagagagagagaggagagtaaagacagaggagagagaatgatatgctatgtgatgtatacattcaggcatccatagaagccagaaaagggtgtttggttctctagagctagttacagtcagttgtggactagccaacttgggtgctagaaaccaaattcaggtcctatgcaagagcagccagcattcctaaccactgagccatctctcagcccccagcataggatttttaccctaagcactaacaaaacctaaagctagctaggcaaggtggaacctatgccactagcaagagcctgaatcaggaggattacttgagtaaaggagttcaaatactagcctgagcaacatagtgaaaccagctcccccaacacgaagctcatggtccccatgcctgcccaggcctctcagtagccttgattatatatcacaccatgcagctacccatccaaccagcttcagatgctggactctcacaaggtgacccacattagtagcaacatctaagaaagggatgagggcgagaaaacaaacaagtttcatgactgacctactggactccagggatttgttaccctgcctcagagctgcttccttgagtcactcaagagcaaaagaggtttgggattatcaagtgtctgcctagtacaacctccattcctccagtgaaatgttccagtcatctgacaatattgacttctgcagtttatttatttactttttacaagaggaaaaagaaggcaatgccccttaagctattgtccactctcaccccttgaatgagttctataaaatgttctctctgaacattttacttgagggattacttgagggtgccctcacctcaccttgtaataaacaccacatatcttctgtacttaaagttaaaactgggagttgtggttcatacctgtaatcccagcattccagaggtaaaaaccagaagaatcagatatatgtgcacagtcgaggctagcctagtctatataagaccttagctcaaaacaaacaaacaaacaaacagaaaagagcacatactggttttgcagagcaccagagttgagttcccagcacccacattagacaattcagagcagcgtataacttcaactccatgggatcaaatacccacttctagactccccaggcacctgcacacatgtgacattcacacacacacacacacacacacacacacacacacacacacacacacacacacacacaaacctcaaaaaattcataaggaactgtacccatcctccttacaagtcctggattacctctttggggtagagttagatgattggggcacttttgtgacagaaggcaggaaagttatattgctgactacaattcacaaataagccctttcttttcctaacttagcaaaagcaagggaaagaacacgtgcaaatgaagagactaagagcatttgtactgagagagcactttggactaagatttcaagacatgagcaccacagctgaagtctcctgccctcactcttacaagcctccttgctcaggaggggagtcagcaaaccccttaggccttagagggcttataaagtctgttgcaactgtgtcattcattctgggttggtgcaatacaagagcagccaagaagagtatcttaacaaattagcatgactgtgcctcactaacactatggacactgatgtctaagtttcatatgattttcacatttcacagaatacccccacccccgtagtttaaaagtggaaaagctactcagggttagatgtggcctatggggtgtagtttatctatcaggtttaaaatgtgtacctattctttatctttatttaatgttttcctcaattctctggctaaaggattctcacaggctgaagaaaccagaacgagtcccaggggtaagaaatgaatcttccattcagtccttcctctcaggaaaaggttgtactccacattttttttcagacatttttttcaggggcagtttgttgctctctcctcaaagacggaggaacattaagaagcctggagaccaggtttagagttcaaatcctattaacccatatcttacagttcaaaagcactgcaaagctgggatccaaaggagagtgacttgatcaaggcaagtggcaagcctggtacagacacctgggtcctgtcctcaggtcccagaactcatttccaagggcagctcctccaaagcgcaggactcaggagtgagcgacctgtaatattccactcagaagtgtgagtaaagtccacctgagcacaagtgcactcacagactgctccttcgtccttcagacagtcagatctgctccagacgcaagggaggggtatgacaccgacccctttggtcagcctggccctagcaagttttagataagaagccttctttctgaaaagcgtcaaagcctctacagtatggaagggggccggaaagcgtccagttcttaaaaggaaaggcgggctgatgccagcttatgacagacagcgcgaagcaaggaagcggtggaaccaccactggaacccatgtcccggctctcccagcccgggctctttctcacccctaaccacacagtgggacacctcggggccaggtctctgcgaccagctggccgctgccaagcgcgggagctgccactagccaggctcctccaggacgttgaaaaactccctttccggcaagcctgcaatccgcgggattcgctacagagggcgctgcctggaattttataggctcgggcacttccgatgggacgctagggcgtctgggaaatgaagtttgcgtgctaaggtgcgagttcccgggcagtttctggacggattcctaggagcactgcgtcctgtttgccttgtctctggccccacccccatcccgaggaaggagaaatgctggcgttaacagcctctcgcctagggcccgccctcagcgaggggacatggaaggacagggcaggcccaggagagcgaaggcccaaacatggcgggcagttagcccctacttccggaatttaaagtcagcttccggaagccgagactgggtttccatgacaaccgacgttggttctttgaggtgagtttagttgatgagccgagcgtagagtggcctgaagtcagaattttttgttgctattgcttttgctgtgggcttttgccgaggcatcgctctgtgggaggactgggaagggtaaggacaaccccgttaagctggagggtgatcgtccgcgtagctagagcgaagggtgcttctaagggatgctaacagtagccttcgatggagcttcgctaagtgatgcgtttggcctttctcacttgctatctggagaaaatgacttcaactctaaccgtgtgtccatgcctgtagctaggggataattctttcctaccaggaagattgttgggaggattataggaaattctcttggtcaacaagattatcctggcgccggtacctaggagagagatgagtgtgaaaactcaagcccagagaagcttggatattcgtatatccaataacatgaggcttttccaccgtgggaggtggacagggcctggacccctccagaacgtctgcaaaacgggggttatatgcactaaaatggctgcttttcaaggccagggattaagtaaggttatgaatatattcccttactcctgctgctgtgtttctgtcataacctcactgtgtcctctcagctctttctgcctgacactgcgtatttatatgagaccatatactctgcctacttagatatccatcagttatgaaataggctggccgcacagtgtctccatcagaatagcagtctgccacttaccagctgtgtaatctgccaaattagtttaccttgctgggcctcagttttctcatcaatgaattggggaaaataaaagtatctcctacttcatgaggttattgtaagatttaaataatatctgaaggaaacaatctctagagtgttgcatgtaatatataaggatttattattactactactactacataaccaggctgtcacttctctgtagtactcctaaatatttttggttagacttgttcatttatcatgtgtaatgggacactcctgaaaaaaaaaaaaaaagcactcaggaagctgaggcaggaggatcaagaattcaaaaccagctgggattacatagcaagttcaaaaaaaaaaaaggaaagaagaaggaaaatgaaaagagctgtgtgtgtaaaaggatctaggcatgtagaaaagtctgatgttattagtctctagaaataatgacatgttgtggtgcagtggggcagagccaggatgggtgtggtttggccttgtcttgttttgtttggagaagaggcttggctatcgtagcccaggccagcctcacactctagatcctcctgtttctggctcctgaatattgtgattacaagtgtatgtcactactcctgcactttatttgggtttttgttttctcaattgttttgttttcttgatgttttgcattcgggtgctcagtaaatgtttattactaggcttctagtattgccttctttgtcattccttccttcctttcttgattctcttccctccaaacaggttcttgcatcagagccagggaaacagctctgatttggaaaaactagacatctctccccaagtacccagtagagaaccagaagttatcttctacagaactgtggaatgtgcacttgggagtcccgaaaagcagccagaagatgctccaaactagcaactacagtctggtgctctcccttcagttcttgctgctgtcctatgacctgtttgtcaattccttctcggagctactccgaatggctcctgtcatccagctggtgctcttcatgtgagtataagagacaggcctgaaaagctgaatccaaacagtttgaaggctctgacagtcacaattgagcattttaaaaaccatcagtgtgtccagaagtctgtgttgtctgggggcttggggtgactatatctcagagaagaacagacctcatgatatcccttagaacttagggccatctcttaagtcctcacataacccccacttggctatactttatgtgtctgcagcatccaggatattgcaatcctcttcaacatcatcataattttcctcatgttcttcaacaccttcgtcttccaggctggcctggtcagcctcctgttccataagttcaaagggaccatcattctaactgctgtgtaccttgccctcagcatctccctccatgtctgggtcatggtaagagtgaaagctctgaattcttacatatttgatttttttaaattttatacaggtattgtgttatgtctgtgtgtaggtggatggaggtgtgggtgccaaatgataacttgtgggagttggttctctttttccatcatgtaagttctggggattgaactgaggttatcacgcctggcagcaagtgcccccaaccactgagctatctcaccaggcctttcacatctttaaagagctagaaatagcttggcatggaggctaaaacatgtaattctagcatccagtaggccaaggtaggaggattaccacaaattcaaggcaattccaggctacacagttaagttctagaccagcctgggctatagtgtaagaccctgtctcaagaggggaaaaaaagcaaaatgtggtagtatatacctgtaatcttagttctctgaaggccatggcaagttcagcctgggatatatatataaaaataagttcaaaagcaagctttgctgacccattcttctaactcagaaccttaaggccaaaatgagcacatgatgggctagagagatggcttagcagttatgagcacttgctacttttgcagaggatctggatttgactcctagcacccatatcagatggctcacaacccgtgtaactccaattctaagggatccaactctctgacctctgatgacactggcacatacatgatacacatgtacatatgaagcactcacatatacacataaaagtaaatcagtttccagacatgggtggcacacacctttaatcccagtacttgggaggcagaggcaggcagatctctgtaagctagagcccagtctggtctataaagatagttcctggccagccaggacttaatagcattatacaccatgccaaaaacaaataaatctctttttttaaaaagaagtatgagccggacggtgatggtacacacctttaatcccatatttgagatgcagagacagacggacctctataagctagaggccagcctggtctacaaagctacacagagaaaccctgtctcaaaaaaaaaaaagtatgaaatatacaaggtacacaaagagatggaagaattagagatgcagaaatcagaagccatgaaaatctgatctgtggtctatgtgagatagatcctttatattcaggctgttgatctgattcattcctacaggtagaaaaggcttgatttaaaaagcaataaaaaacaaaaacaaaaccccaggaagaaaatggtaaggactggggaatatagcttggcagcagggtatttacctggcaggctcagtgccctaggtttgatcaaaccctgtcctgccaaaaggaaattcaactagaagtccctgtcctctggaaacactagtagaaggtgggtaaatgaaggtatcctggctggagtttagcatatgacagttcataggcactttgtcagctttctgtcttcaagaatccagggacttttctatttgtagcagtcagtttacctttaccccagataggcctatcagggttaaaacaggaagttgagtctgttttgtcatctgctgtatgggtaggtgagtgttaacaggggatattaggtgttagtgtcccgtggttaatattacaggcattgggtgtttctgagaagcagccactcaagagtgttgctttcctctatgcccattgctgagtcccatctttacaccagaaactcaatccccaggatgtttctccttagttttcctgtaggctccagatctgatctagttctcctggtttcagattgcttttttaagaatataatttaagggctggggaggtggctcagaggttaagagcattgaaagttaggactgtgaccccagggttagagctcttacctagaatttgggaggccctggccttggttctcagcatcacaaaataaaacagtcacttttttgcttctcttttgacccactgtgtgggtgcccctggggtgccatagagaagaagcagagctcacaggaaagcagcagagcagtgtgcagggatcaaggggcttcctctcccagagtctgtgctccacttcctggagccctgtgttcaggctgctactgtgattgagccttgagcctaaatgctccgaagttgtgacctgccaggagctgagactgagattgagactgagggctggacagtgagcagtgaagcttctgagataatttcttcttgacaaaagcaatagagtggaaggagataaatacttcagttcaagcttagaggagatccctttgaagggaaaaataaaaaggggcaggggagcagctgagagctggtaagtagctaaacaggtaaaggaacttgctgccaagcttgacagcctgagtttgatccctgggacctacatgacggaaggagagaactgactgtatctttgcatgcatgctgtgtcatactggaaggcacacacacacacacacacacacacacacacacacacacacacacacacacaatttttgttaattaaaaaaatttttttgagacagaatcgcactaatagtcttggttggtctggaactcattctttaggttaggctagcatagtaatctgcctcctaagtgctgggattaaaaggtaccacggtgtccagctgaaaattctatttatttattttatgtgtatgagtgtttacctgcatatgtacatcatgtgcatgcccagtgtccacagaggccagagaaagcattggatcccctggaactagagttataggaggttgtataggagttataggagccattgtataggtgttaggaactgaatctaggtcagtgctcttaaccacttaaccatctttccagcctcataaaaaaatttttttaaggaggagtttgaggctttcttgagaaatatactttgaccttgtgaaaaggaagtaagattagtgtgattttcaaccaagtggctttgctgcttccaagcaggttggagatgtaatagtctcacgtagcctttaacctttccctttctactcatgtctcctttagaacttgcggtggaaaaactccagcagcttcatttggacagatggacttcaaacactatttgtattccagagactaggtgaggagtggagcagcttcaggtgtagccatgtcctgctgtgtctggtagcacagccttgatcctggcttcacaactccatcagggtggcctgggatggttgggacagccacacataaaggaaagaggaagggctgccctcctctctctctgggagacagcgagaagcctggggcagtgctgggtctggctgggcttggttgcccctgaagggaacactgaggatgtccctggctgaggctagtctctgcttttgtcctcagcggcggtgctgtacttctacttttacaaacggacggctgtgagactgggagacccccgcttttaccaggactcactatggctgcgaaaggagttcatgcaagtccgaaggtgaccacttcatgtcccgttgatgaatgcctttccttcctggtagaaacctcctgggctgctctccagggaaggacagcccttggcaccaggaaacatggacttcctaggaacatgctcaagccagctgtgctcagcattcaagaaggaagactctccaggcatggttggaaactgaggcaggagaattttaatgagtttgaggccaccctgggcctacccagttgtaggatggcctgcagagggagaccctgtctcaaaaagaaggaagacctttcccaatccaaattaaagtattttccccagactgtagaacaaagtgcaatcttgcctcctacctcagtccatcctcttctcttcctgctccgtaccacacactttctcttcccctcctccttcctgagggctctgcagctctggagctcccactctttgaagcttatggctcagcctcaaagtagcagcctcccagcccaccctgctctcctgataccatacttgagggactggaagttatagacaatgatgggcatgtcctcctaactaaccacatgttagtcatttagattttataaccaatgtacttttttacagttctaaaaggaaataaattgaatcttttttttcataaatggtaaagtctgtgtctatttaggtgtcttcgtggtgaagaggtataccaagtcagagagcctcaacatctctttgacccatggggcatattgatctataaactagatagagatgcacactgggctacaatatgaagactgtctctaacaaaacaaaacgagagttctcttctgttctttaaagtgtgatctcatgcctgccccaagccctggagttccatatttcagtgcttccttcagattctatgtttactagaagctaaaatggtcctcaggagaaaaaaaaaaaatgctccagcgcctgtttggcaaaggaaagtgtagggggaaatgctggccatgcccgatgaggctctctctgttccctcacccacctggttgtacaggaggaaagttttagaatttgtatgctactttctttttgtgtgtgtgtgtgtcaggagagggggttcgagacaggatttctctgtgtagccctggctgtcctggaactcactctgtagaccaggctggccttgaactcagagatctgcctgcctctgcctcccaaatgctgggtttaaaggcattgccaccaactcctggctatatgctgctttctattgctagagtaccatgtaacaaaccatcaccaaactcagtagcatgtatccctgtgcagttggctgtcacaaggtgggttcagctgatctgggctgatgggggtgacaccagctgggcctgctcaagtctgtttgtggtcagccatggtaatcttggacctttaacttggctaacctaggatgacctcaggaggaataacagtttactgggctgtgggtcttatgattcatccaccagcagactacctgggtctgtgcacatgatggtgacctaggagcaggaaagaacgtgtcacattgcattcacaggtcagtcctctatttcaattcccattagtcaaagcaactcatgacctaaaacaagggcaaagtagaagcagcacaaagtttcaaggcagaaggtttagaaaggacggggagtgtagctcagcactacagcatgaacagaacaaggccctgggtttgatccccagcactgaaagagagcatgagtacatgtaggacaggacaaagaacagactattaaccgaatcaggccacacctcatagctgtgaggagcatataaaatgtttaagcacaatggctaacacgttgaagaggccaggtagcaaatactggactactggaccgtgacagtgaagcaggaacaaagccatatatgctgtatgctatagtacctgaatgaaaacagctgtgttctagaaaaactagtgtggacactgaacttttagtttttttttatttgcatatgtcaccaaatactcatcttttgatttttttcatataaaaaattttaccaaaattttgagggtagaagcttgggccctggcagctcagataagcaatctaggcttagcctcagtacttgtcctcagtacaccaattaaggagataagtaatagtgaaaagcaaagatgaggttattcaatgttttcacattgaaaaggacaaataaaagtgtctagtaatcccccaagtccatctgcagaatattggacatggagttttaagtttagatagaaatgggtgacaggatggctcagcagttagagggcatgctgtctttgcagaggacctgaattctctccccagctcacaagtgtctgtgatcccagctctacaaggatccagcacttctggcctctgaaggcacctccacacacccacacacataattaaaacattttttacgttcatacaaagtgtatataacaaagcagtcctggtcaaggtgtgtcccacccatcattgatccatcattgtcttgctctagttgtcctgaaggaaggaaggaagtctggcaagttggcaaagctgtgtgaagtctttccttggggaccagtgccttcttgtggctccaggcttctgcccttcccttccctctgcataagatttctgggggatgtttgatctttgggttccattgaatagtctgaaagcacaaatgcctctttaagattactctcacttggtggtagtggccacaagcctttaatccagtactcaggaagcagagacaggtggatctctgtgagtttgaagccagcctggtccacaaaactacttccaggacagacttcaaaactatagagaaaccctgtcttgaaaaacaaaacaaaaccaaaaaagattactctcctgagcatgctttaatcccagcactcaagaggcagaggcaggctgatcgagtttgaggccagccagatctagttcctggatagccagggctacacagagaaaccctgtctgaaaaaacaaaacaaaacaaaaatatcctctcctgtgagatagttataaaaatgccaaaaaccactttttaaatagttcagattttttttaagaacgaaacaaaaataggctggatttggtgtaaggccaaagtttgctaacttctgctttatatttgagaccagcttgggcatcatagtaacatcgagtcccaaaaggctcagtgggtaaaagtgcttgctatacaagcctggacctgagttaaaattcctggaatccacataaagagccagataagggcactggaaagttggttcagcagttagagcacttggtgctcttgcagaggagcagggttcaattttcaacactagatcaaagggagaagctatgtgagtgagatcctgagatctggaggatgcagcttccagcccagcctcgggctagtaggctgcactctcctgagttggctggtgccatccagtcctgtttgtcaatgggggcagatgtttgtgtctcttgtcttttgaagctctgaatgtggtttgtttgtaaggctcctctccttgccaggtgtcctgccataggagataattgtagggcactagcttctaagttatgtggatttgactataaggatgaaagatttccttgactgtatgaatacttccacaccagggccccacaattagccaattaacaataaaagagggagttgtgtccaataattgattaatacactgctgtgaatttgggggacgaattccaccgtgggaaagggggagcgctatggtttcacaagggcttttcagagattacagtgactattcaaaaggcaggcattcccaaggctttgcaaatgtggtttctctccagtggaatgtgtcgatggcaatcccatgtgttagcctggtgaatatgtcccttggaatcttactgtatgatcttgtggagcgaagcacctattaatcctgagtcccaggattaaaggtgtataccaccacctcctagtttctggctgctggaatgaaaggtgtgtgcctggcttctatggcttgtggctgactttgctttctgaatcctcaggaaagtttcaacaaatcataaataatatatcagtacaatattatttccctctatgtgtattctgtctgtcttttcaccacatgcatgcttgttgcccacagaaaccaggagagggtgtcagattccctggaactggagtgacagacagttgtaaactgccatgtgtatgcagggaatctaacctgggtcctctgttgaaaacagccagtacttgtgactgctgtgccatctagctggccacaatacatttttgtttaagccaaatgagttctataattgcaggactggtatgggcaatgggaagagagacaggagagtcacactgtagcttttatcaaaagttcaatggcagaaacaacaggaaagaccctgccttaaaaacaaggtggaaaggtggctgagtgcttaagaacaagtactcttccagagggctcgggtatggtttccagcacccacatcagggggctcatacatctagaactccagctccagctccagttcatacatctataactccaatgttctctggcctctgcgtgcatatagcacataaattcacatgggcacacacattaatttaaaaaaaaaaaagtggaaggagagaactgagtccccaaaagttgtcctgtgacccttgcataagcacctaagcacaggcacactttcccccactcctcccccatactaaaatctaataaacaaataggacctaggcataggcacactttcctcaccccttttcacacacatgtacacacaaaataaacaaaatctaataaataaataggcaaaatgtatagacaaatgccagaaagaaaaacaaagttgtcctaacaataaaccctacctaactacttggagcctaccccatgtcttgtaatgccttcttagaaacatctagaaataacacccagtgacccatggtcttaccccaaatgcccagtctcaagaaagataactggatggaaaacttactacttaacaagactgtgagacgtctacttacctctatagacacgaaccccacacaaatgacccaagagataaggccaagcaaacccccttaactgtatcaaagaaccctctctcttgcttcctctggtgggaaagtctctgagaattcacccacatctctccctctttagtctctcccatgtcagctgaactgatggtgcacacttgtggtcccaactcacttgtgcactaggggttgggaaagactgagccaagaggattactgtgagttcaaggccagctcagtctacatagtgagttttaggccagactgaacaaagcagtgagactcaatagggtcctggtctggtaaatactggttctcgccctgatacagaacattcagatacagtgtgtaaggtgctggccttgagttctccaatgggaacaaatggtcttaaatgctaacaaagttaccatctgcatttcatacctttgtgtgcagaaaagaaagatagggatgagtgaatagcctgatcttgaatcttttcatgaacgcctgtactatcctgatagccgtaggaggagaggggctgtaggaaaagcccaaaagcctccccagtttgggtggcagctgaagactgtttagaaaaactacaactggaaaaaatcctacacttgctcaaagatgtgaggagaaaacaaaagaaacctagcaggttgggcaggaactcaggcaggagtccctcctacagctcaggcttgggcctgggcccctggcctcaaagcagctttttggtgaatttgtactttaacattgggcaccaaatatgtaacacaaaaaataaaagacccagagactgatattggggttcaagcttcaagctgaagatcagaaaagcaaagcagctggtcactagctctcacctctggctcaggctgaaagggctgatccacgagttcaccaagcctcagactgctgcctctcctctgtgtggctggagagaatcctgagacttcaatgtcttcctatccttaatgtggctagagaatgaattctagatctgagaccctgttcctatcttttataccactctagtgttgggattaaaggtgtgtgataccaagtgctgagatcatctttgtgtgagccgtttctctagttttctcttagcactgaatcaatttcgtgtagtcagtgtggctttgaacagacagaaatccgcctacctcttaatcctgagtcctgggattaaaggtatgtgactagcttctgtgacttgtgactgactttgctttctgaatcctcagaaaagctttaataaatcataaatatcaccacagatcctgtggaagagcagtgggtgctcttaaccactgagtcatcccttcagctgctatgagtttctctattttgcatattgggaacagaacacacagcctactttgtcaggaccaccagagcccagactttgacttttaatggttctggtaacaagctttgttgttgttgttattgttgtttttcaagacaagatctctctgtagctttggaggctgtcctggcactcgctcagtagactaggctgttctcaaactcacagagatccgcctgcatctgcttcccaagtgctgggattaaaggcgtgtgcccacaacaccagctcatcacaatctcttaaaggtcgacaattttctttgttcctgaaatgaatcaactgcttgttgcctgttgtttttacagcaagtgaacacaaccaattacccacttctcaaaatatttacacatctgctggcccagtgactctctggtgtgtgttagtgtgtgcatctgcttccatagtgttgaaacaagaaacggtgattgagggagggagaaaggtctggctccatagagacaggctctgaggcagggttctttattcacattggtactacttgggaactcagctctatgtctcaggagattggggagcataaaagagttatttattgataccatgggcagacagacagatggcagcatggagaaggttctgaggagagctcaggcccttgtgaccgagtgggagtcccttcttacagacttcagaagaaggagcaattcatgacacagagaaggtgagtagtccacaccacaacacaggcctgcagccaggctgttcctgcttccccagcatgagtgggggtggcagtgggagtggaaggcatgggaaggaatgtgtgacgtgaccttaccttgagaatgtgggggcagtagagaggagaggcacatctagttaaagtgtgcatattacactggtagctctctgttgactccatgcctgagcctgcagacttccttggagaagtgagaattagaacacctgcctttctctaggaatctgggcacctgtggtacatgttagtcagcttcagcttcagcttcagcttcagtgacaggctctcagtttccttcacagcagctgtgagaaagaggctgctgcagtgcgcatggcctgattagcccctaggctaaaacataatatttaggcatttacatggtacagaattcaagttataaaaacatttaagccaggtacagtggcacacatctgtaatcccagccacttggaaggcagaagcagtctagtcaatatagcaagactctgtctcaataaatacatgcatgcatgaatatatacatattttataaggctagaaatacaggtcagcggtaaaatgcacctaacatgtatgaggcactggatttcatcctaaaccctgtaaaaagggatacaccacaatccccatcaccatccccaatccacttgagtttcttgtccctgccctccttggcaatctgtatctatttatgtaatcccttcctcttttgttaaagatagatttttctgtgtgtcacacactgcccttgaactcaatattctcctgcctcagcctcctgagtgttgtgatgttatggaataatcctttcctactctgtaaagatgtatctttgccatggcatcttctgactggcttaataaagagctgaatggccaatagctgaccaggaagaggttaggcaagactcctgggcagagagtgaggaagaggagttgaatgtaggtgtgggagagatgccagaggacacagagaggaaacaggaggtgcaagatgggagagaggtaaaaagccacaaggcaaaaatgtagattaataaaagtggtttaatttaagttacaagagctagtgggacaagcctaagctataggccaagctttcataattgataataagtctccatgttgttatttgggagctgatgttacagaaaaagcctgctatattttgataacaggcatgtgctaccatagtgtagcctttatttatagacttctaacggacaatataataatgatcagaaacatttttttttcttttatgagaacatttgtctgtgtgagggtgtctgattgcctggcactggggttacagttgtgagctgccatgtgggtgctgggaattgaacctgggttctctggaagagcagccagtgcttttaaccactgaatcatatctccagtcccaatcagaggcatttttacaaaggaaaacttgctgtaatgctacctcactcatttattttaaatccttggcactatgcatattttatagatacttgtaatgtgggggaggcataaaatatatttggtttctgccctgtttcctgacacttaattcccaacaccctcatcagcatcttggatgctgataagctgaaggtatctggggacccctggattgcttcacttggtatagctggctgttcgggagctcctgtgatgaaagggttggagctttcagccacacccagacctctggggaggaaggagtgctgaagattaagccagtctaccaaccaccaataattattcagtcacacacatgtggtggaaccctttcagaagtcctaaaggacagtttagagggtgactgaattgaaaatgcaaatccaggtactacgagggtagcgcccccacctggagagggagtggataagcctcattccagcacttagcagttgtgttctattttgttttgttttgctagcttggaactgtgtagctcaggctggctcaaactcatggtgatttcccagtcttggcttcctgagtcctgggctcttatgtgtgagccaatacataagcctctgttgtgccctttataccaagccagtaacatatagagtcagctatctgcctgacttcttctataaagttaagcatttttgaaggaacaaaaacagcagttgggcctggggtgtagctcagaaacacagcatataacttacatgcaacagggtcctgtgttcaatccccagtgcttgggtacaggatgccaccaaagataaggacagcagcaacaacaaaagttacatcagctctccaagctggacaactcagaaagataagacaacaagcactgggacagataagagctaagtggagccggggagcctttaaataacaagcaaccaggccagcaagatggctggacaggcaaaggtgcctgcagccaaacctgagggcctgagttagatcagatctccaggacatactgtggaaggagagaactaactcccacaaactgttctcctctcccccaccccatctctctgtttccccccaacacacattaaataaatgcttaatatttttaagaaacaagctgctgggcactgggggcacgagtctttaaccacagcacttaggaggcacagacaagctgatttctgtgaatctgaggccaacctggtctatagagctaggtcagcagttacacagagaaaccttgtctcaaaaacaaaaaacaaaaacaaaaataaaaaataagaaaaaaagaaactgttactgcagtctaaaaagagactatagtatcccagtctgggatgtacctgaggacaatgcttgtctaacatctgcaatgctttgggtttgatcccaagcactacacaaattgggtatagtgggctcttgtctgtaatccaggcactttggaggtgtaggcagaagtcacagagggttcaaggtcatcttctgttatacagctggaagccagcctagaatacaagaaaccctttctcaaaaacaaacaaaaagtgtttatctagtcccactttcagtagaatggagttgcttctagctagccaggaattagaaaaactagataaaacacacaaacaaatatcactttctcaacagtcacagagagagatgacagtagctcagtggtagactgtgtgctcagcatgtacaagccctggattccatccaagcactccacccccaaacacacacacacacacacacacacacacacacacacacacacacacacacacacacactcaccctgaaaagagataagatagcctaaacagacacttgtgccctttcctttggttaacagatcattaaaacaatagccccccaaatcttaaaaatttcctaggaatcctaagctgtaaccctggcacaagtgagaaaaaaaaatcctctcccaaaaaagattttgcaaactccattttggaagacagactagagcagaagcaatgatgagtcagtgatgggcgggaccacagcttgatcaggattgttttgttatacacactcttgccctctctttaaacctaaacttcatgtaagacctagaaaagggccttttggcaggggaatcactggatctcttcatttgctctttttgtctatgtagccacattgactaagtctcctttttctgttttcactgttatctctttaattggtgtattgaggatgggtgccccagtgtaacttgttgggattgccagagcccagactgtgaccctaacaactacagtaacatacacatatgtactgtgtgaatgcatgttcccaaccactgctgaagtcagagggaccagagcctgccattgcagagtagggccaatcacacaaaagtaagtcaacgattgcaggagcttctccctggggctgtgtgctgttctgagtttgagtacaaggctaggaatgcaagaatacacatggtcaccaaacaagccagttgaactgagtggcctcagaacacgggggggacaaaactggggacttggggaggtttgaaacaacaaattttgccctgagatatttccagattctaagactagaggaatgtcagaggcaaaaaaaaaaaaaaaaaaaaaaaaaaaaaaaaaaaagcctcaaactctctgaaaagcagaacaaggttttaggctgatggtgctgataattagaagccaacacccatgaggtggagggtgaaggatcaggtctccttactgggaacaagaggaaacacgtcatgaggtgtgttaagtttgcagtgatgggtttgggaaccacagagtggtcaagcgggtgccaagcccaaacatgcaagaggtccttggttcaatcttcagaaccccatcttaggagatgatgttgcagcatagcttccatcctgggttaaggtgactttcatctggtctagcagatgaaggagtgggagtgaaaacaatctcgagacactaagtttttacacatctaataaaattttggaagactggggaaaaggctcagtgtgttaagactccttttgtctctgtcttctggggctttcacggtcatagtttattttctattattttgagacaaggtctcaggctgcccagttctggctcaaactcactttgtaggtgaggatgcccttcaattcttttctttttctttttttttttttaagcatcatgtgtatgagtgttttgcctgcaagtatgaaagtgcaccatatttgtgcctgctgccaaaggagatcagaagagtgcatcctatcccctgggactggagttacaccacgcgggtgctaggaattaaaccaagtcctttacaaaaggatcaagtgttgttaatcactgagccagttccccagctcacatttatttatttgtgtgtttgggggcactgcatagagtacatatgaaggtcagacgacaacttggggtagtcagttctctcctccctttacataggtcccagggatcgaattcatcaggtttgacggcaaactcgtttcaatttcaccaaccccctctttggtagtttttgacagtctaatgcagtccacactacattatcaaacatcatatattcttgccatagcatcctgagtggtgggattacaagtaggaggtaccattgcttaaaggggtattgggtttgtgggcactctttatggtaccttcacccctccagtttgttgaatttctttttttccttccttttttccattttatttatatgtgtgtcatacatgcatgtcacatgagggtagagaacaacttgagttggttttcttcttcaatcatgtgggtctcagagatcaaactcaggtcatcagttttggtgaaaagaacctttacccacagagtcatcttgttgtccctaggctgcctgcccctgaactgtcagtcctgtctctgccttctgaatgctgcatttacagacaagcccaacatgccaaggttctccaccaggtgagggtgtgtatgtatgtgggaggggcttcatcccattctcaaatcactttagctttctctttctatcctacctctgatttaacagtcagaggacttcagagtaaggatcagtggcctggaagacaacagaaattatccaaaccaaagaacagatagaagagaaataggacagcccagtttcaggaactgggagaatcagactaaaattaatataattagagcttaggaggcaaagagaaagaaaagagcagacaggagccgggtggtggtggtgcaatgcctttaatcccagcacttgggaggcaagccatggggatcactgtgagttcaaggccaacctggtttgtgtgtgtgtgtgtgtgtgtgtgtgtgtgtgtgtgtgtgttatttctagtacagccaggggtacacactgagaaaaaaagaaaaaggcctgtatctgggtgtatcacagtcacactacaactaaagaggagaacaaatttgctgtttatttgcttgggttttggtgcagggatctgacctaggaccttgcatatgctaaggctctatgcctgttcaccacagcccaactctgagagcaaaagtcacacagcacatacagaggacttgcaaccagctgcttctcaggagttcacaggccaggagtgagcccacagcagctgttacatacccagagatggaacattcagaattccacattcaccaggaacaggccttgagaatgaagctgaaatatgttttcatgtacaagaaaatagaattagctgcagtgggaaagaaagcacgaggacccctttctgttccatcctaaaggatcttggcttgcacttttgtgacaaaagacagatcaaccagagtaacacacatcaaattcatctggccattgttttataggacatgagagcctttgggttagagaaccaacatccctgatgtgctattaatttttgctcttttgcagtggagtggggatggcatatagaaatgtggttggacatgaagggtctgagtgacagaaacagcttggggcagaaaaaggcctgtttgctcatgctgagcctctccattgcagcattccttcctcctggctatgggccaaggcctcgctggaatgaggatcttaacttcatgaccagctgctgcaagggaaggctaaggggaggtgagaagactttctttgctctgtggctggctttgggggaagagtccccatttctgtgatctgtcttaggttcatctagaactagttgatctagaagaaagttctagttctggtggcctgccatgggggacactatgactggtgagagaggagagggctaaagaggccttttgaagtcttcatttggccagacaggaaatgagaactgaggaaagtcaggtcctcagaaaggaagccagccactgtgtcagtgctgtggttctgctgtgagactttcctatgagtatgtagaataacatctgcccatcaactccaagaacaattcattcgagttcatcttttttgtttgttttaagcagagtctctactatagccctggctacctcagaacccagtatgtagatcaggctggtgtgggattcacagagatctgcctgcccctgcctcttgaggactgaaattaaaggcatgtgcccccactttgggccctcaagttcattttcaataaaatgatttattaagggtcatttatgttttcctgtgtttgaggaaaacacaggcagctgtgttttcctcaaagtcaccagtccctttccccttaggaagctccagattgtttttaattacatttactaattttgtgtgtgcatgctgtgtgtgtgtgtgtgtgtgtgtgtgtgtgtgtgtgtgtgtgtgtgtgtgagcatactcataggtgagcatctccagcatgtggtgatcagaggacaaattcgggagctgatccttttctttcactatcaggtctccgggcttgaactcaggtaccaggattgatgagaaatgactttacccactgagccatcttgccggcccagaaaggcctattttattatggctctaactgtataaaactggtgagattgctgagtgaccgaatttgatctccacgcccacataatggagagaagtgactcctaaaacttgttctcttcacattctagtggtggcttgagcacacccatcatgctctctcgttctctttctctctctctctctctctctctctctctctctctctctctctctctctttgtgtgtgtgtgtgtgtgtgtgtgtgtgtgtgtgtgtgtatgtgtctcctctctctcacacacacaatgcacgcacaaacatttttttaaaaagtgcttcaaatggttgcaaatctaggttcagagcgctacctagtgttaagtgctggggtgactgcaggcttagacaaaaggcacagacaaaaccagagactgggaaagttcagtgtgtacatcctgattgctatcagggattctgctgctctcagcaaacattgccctacagtgggaaggactgctttgctgccctctggaacctgggcaagttaaatggcaacttgctgcaaggtggagctactctgccaggattcagaggaaccttatgagtcctgggttcagttcctagcacctcaaagcaaaacaaaacgatcccacaaatacaaatgttatcaggaaggaaagggggctgtccctgtggttctcacaggtaataaagagcacgatgaatgtgtgaaaaacttcatagtcatgatatttgggattttaaagaatgagaagctcttagaaaaacaagagtattccaatcttactcgagaagtagaaatctaaactgtcttaaatacgttaaaagaatttagagatgttcacacatacaaaaattgcagatttagctttatcagtgaaatttcataaatatttaaagaagaaatacctaatctcttcatctctttcagagactagaacaagagaagcttttgcttcattttattttttaaggatttaccttcattgtcattttaattatgtgtaggcgtacacgtctgcatgtaggtgtgagctctgggagagtaccgagggctcctaacttcccagtcatctttccagccctcgtatttcttcattttgagacagagtctggctatacagcccacgctggccttgacaccagctcatcccacctcaccctcctgagtactgagattatgggcatacatcatcatacccagcaaagctgctgcttcttttctctcccttgccccttggctttttttttttttttttttttttgtggctgaggatcaaacccagaaccttacatatgctatgctaggcaagcactgtgtccctgagctttattcttagccttgtgtcattttttaaaatatatttattatatatactgtgttctgcctacatatcagaagagggcaccagatcaaattatagacggttgtgagccaccatgtagttgctgggttaagagcacttggctgcttttccagaggttctgagttcaattcccagcaaccatatgctggatcacaaatacatgtaatgagatctggtgccctcttctggcctgcaggcagaacactgtatacataattacatagatttttgttttgtttgtttgttgtttttttttttaaagataacatatctatgtcagtagtccccaagaccacacctagtttcagcggttcactaggagaaagcacagaaattgtcacaccccatcgcacacgcaaaaaaaaaaaaaatttttttttttttttaatcaagagttgactggtatactcctgttatctaatccctaagaaggtggaggcaggaagattaggagttcacaaccctctttagctacaaagcaagttcaaggccagtctgggttataggaaagcctgtttcaaaaacaacaacaacaaaaatctactaaaacgtatttaaaataataggtgtattagtcaaggttctctagaggaacagaacttatagaatgaatatctatctatctatctatctatctatctatccatccatccatccatccatctatctatctatctatccatccatctatctatctatctaggttttattagaatggtttacaggctgtggcccagctagtccaacaatgggtgtctaccaacagaaggttcaagaatccagcagttttcagtccacaaggctagctcttagctggtcttcagtgcacaccagaatcctaagagggagagtctgatcccatcaaaggactagtgagatcaagagtaagcaggcaaagagagcaagcttccttctttcacttcctttatgtggctgccagcagaaggtgtggctcagattaaaggtggatcttcccaattggccgggctgggcagagaagctggcaggctgattgcagatcttcacctctctctctgctccaagttcacttccccaacttcatccccagatctaaaaagctagaagggcctgacagatgtgttgcagactcttaaaagaccatggacgccagtccagactactatacccagcaaaactttcactcaccatcgatggagaagataagacagtccaagatacagtcaaatatagtcaatatccacaaatccaccccatagaaggtgctagaaagtaaacttcaaactaaagagtttaactacatccaagcaaacacagggaatcaataatctcagaccacacacacacacatcaccaccaccaataacaacagcaacaaaatagaatcaacaatcatcaatggtctcaattcccccaataaaaagacacagactgtgctcgcttcggcagcacatatactaaaattggaacgatacagagattagcatggcccctgcacaaggatgacaggcaaattcatgaagcgttccatattttagaataaaacatgtaatatttaaaaaaaaaaaaaaagacacagactgcggctggagagatgactcaacagttaagatcactggctgctcttccagaggactcaggtccaattgccagcacccacatgacagctcacaactgaaactccagttccaggggatctgacatcttcacaccaatgcacataaaataaatttaaacaaattatataaaaaagacacagattaaaagaatggatatgaaaacagaatctatctgtctgatgcatctatgaaacacaccatgatatcaaggatgggcattacctcaagtaaaaggttggaaaaatatatttcaagcaaatgaacctaaggaacaagctggtgtagtcactttaatatctgacaaaatggatttcaaatcaaaactaatcagaatagattgggaaggacactatgaactcatcaaaggaaaaatctgctaagaggacatttcaattcttaatatctatgtcccaaatataaatgggtttttctttgggctgccagctcacaaaaaaattacacagagacttactattaattataaaagctcagctttagtttgggcttgtttccaactagctcttataacttaaattaacgaatttctatttatctgcatgctgttgcatgtgccatggcttttcacctctcttcctgcatgtctggttttcctcagtgtctggctaaaaattccacctttcttcttcccaaagttctctctgtccagaagtccctgctatacctcctgcctagttattggctatttagctttttattaaaccaatcactagctatatcttcacacagtataatgaaatattccacaacacccaacacaaggacacccaagtttgcaaaaggaacactactatagcttaaatcacatattgaccctcacacgctgacagtgggagacctcagtactctcctctggcctatagacaggccatctagaccaaaactaaacagagaaattctggagctaactaagactgtttataaaccagatgaacctgacagatatttacagaacatttcatccaaacgcaaaagaatataccttcttctcagcatttcatggaactttctccaaaattgaccctgtacttagaaacaaagcaagtctcaatagatacaagaaaatcaaaataaccctctgcatccccaccacaaattaaagctgaatatcaacaacaacagaaacaacaaaaggcttacaaactcatggaaactgaacagctttgtactcaatgaaaaatgggtcaagccaggcagtagaggtgcacacctttaatcccagcactcaggaggcagacaggtagatttctgtgagttcaaggccagcctggtctgcagagtgagtgacaggacaggctccaaagctacaaagaagcctgtctcaaaaaaatgaaaaagaaaaagaaataaagaaaaaataggtcaagacagaaataaaaaagaaatcaaagactttctagaattgaatgaaaatgtatacatgacatacccaaatttgtgggacacaatgaaaactgttctaagaggcaagttcatagcactaagtgcttatatttaaaacttggagagacatcatactagcaataactcacctgaaaactctagaacaaaaagaactcataccccaaaagagtagacagcaacaaattatcaaactcggggctgaaaccagtaaaatagaaacaaactaacaacaacaacaacaacaaaatacagtacaaagaaacaatgaaacaaagagtttggttctttaagaaaatcagaaagacagacaaacccttatgcaaataactaaaaggtggaaagagaagatccaaattaacaaaatcagaaatgaaactggggacataacaatagacactgaggaaatccagagaatcataaggacatgttttaaaaacctttactccaccaaactggaaaatctaaaagaaatggtaagttttcttgattcatatcatttcccaagttgaatcaagatcagataagacaagcaatttcaatagaagcagtcattaaaagtctcccacccacccccaaaaggcccagggccagatggttttagtaaatagaattctaccagacattcaatactcttcaaattatttcacaaaatagaaatagaagaacattgctcaattcattttatgaggccacagttaccctgatatccaaaccacataaagacccaaacatagataacagaccaatttctcttatgaacatagatgcaaaaaaatactcaataatacaaaataatactccacaaaccagctgggcatggtggtgcacacctttaattctagcacttgggaggcggagacaggcagatatctgagttttaggccagcctagtctacaaagagagttctaagacagccaaggttgcaaaaagaaaccctgtttcaaaaaaaatgaaaataaaggaaaatacttgtgaatcaaattcaagaacacatcaaaaagatcatccactgtgatgaaggacgcttcatcccaaagatgcaggaatggttcaacatatgtaaattaataaatgtaatccactatataaagaaaccaaatgacaacaactgtgtgatcatttcattagatgcagagaaggcctttaacaaaatccaacatcccttcatgataaaagtcttggagagaatagaaataataaagggcataccttaacacaataaaggcagtttatagcaagcccacggctacttaaatgaagaaaagctcaaagcaattgcactaaaatcaggaagtcaagtaatttctccatacccattcaatatagcacttgaagtcttagaacaataagacaagtgaaggagaccaatggtatgctatttggaaaggaagaagtcaaagtatctttatttgcagatgttatgatagtaaacaaaagtgacccaattctattacgaaacacctacagctgataaacactttcagcatagtagctggatacaaaattaactcacaaaaatcaggagccctgatgggggaggtccttctgtgtatatgtttatcttattggttgataaataaagtactgttggccaatagggaagcaagataggtgggactaggaatggaggaggattctgggaaatgtagtagagacaggagtcgagatgtgagcccggcaaaagaggactcatgccgctgtgtcctcgatcagataagtctttataaatatatagattaatgattatggttgataattaagacagagcttgaagataagaaatcctagtcattggccagcagcattgtacctaatataagtctctctgtgttacttggggccctaatgtggcgtggggggggggagcagaacttaggtggttggcggaaagacttattacagagccctcctatatacaaatgacaaacagtctgagaaagaaatcaggagaacaacaccttccacaatagcctcaaataatatagaatatattgggacatgtctaactaagtaaaagaaacacttgcatgaaaaaaattcaagtcactgaaggaggaaattgaagatatcagaaaaagggaaagatctcccatgctcatgaattgtataaaatggccattctataaaaagtgctataggcaacacctatgaaacacattgaacgatggagctgaggagctgaagcctgcatagagccttcactcctatgttctagtgtctttggtacaggaagagaaacaaacaccaaaccagccacaaagtatttagagaaccaaaccaggcacaaaacctttatctacaatggtgtactaccaggttaggtcaatagtggcacaaagctcatggaagtaactaaccaataaatggtttgacttaagacccactgcacaaggtggaacccatacccgacactctttgggtgaccaagaacctgagatagcccagggccctagagtaaaactaaataatactggtttaaaaacagaaaaaaaaagtagggattaaaggactcctaacaacattccactagactcttagattacttccttgctcagccatcatcagagatgatacaccagatgggaaatagagacccacagccaggcattacacaggaagtgagagatcttggagcattcagccctaaatgggatgtctccatcaaatccctccccttcagagttcagagaacaccaaagaagaggagatggagagaatgtaagagccagaggggatggaggacaccaagaaaacaaggccctctaaaccaactgagtaaagctcaaacgaactcacacagactgacgcagcaagcacagggccaatataggtctgcaccaggtcctctgagtgtatactatggcttccagctcagtgtttttatgggattcctgagcatacaaacatgtgggtctgattcttgtatttgctgttgggctcttttcctttgttggtttgtcttgtccaactttgatgtgatagttttttctattttattttaaagataaatgaacaaataaatgaaaaacctagacacaggatgaaggttaataactgaactttcatttatatctgctgggagaggtaaaatctgttttcctcaatggagtggtacaaccacactagggcaggccacatgttaagcaatagttgaccaacatataatgaactccattgttttgtgtgtgtgtgctttttatttggttacagcttggtacttttgtttctgttcgggtgttgctttattttgttttcttggttgggggggtttgttgttgtattgggtttttgattgttttctgagaaagaacttaaagttgggtgggtgggcagggagaggatctggaaggacttgggggaggggaaatatgatcaaagtatatttacatttaaaagttgtttaaagaaaaaaagtggaagaaatagtcttcctcatggaagagcacaccaattagttatcccatacagaatggtcagtcctgaaaacaacaaataaaattatacagattgagcaggctataattaggaatatatatctatatatctatatatctatatagacattcatatatatatatgtatatatatgtaacaacacttaagtaaaaagaagccatgaagttgagaaagatcaaggaggggtatatgggatattttggagggggaaaagggagaaatgatataattttattataatctcaaaaaataaagtgggctgaagagatggctcagaggttaagagcactggctgctctcccagaggttctgagttcaattcccagcaaccacatgatggctcgaaactacatataatgagatctggtgccctcttctggcttgcaggcaaacactgtatacaaaaacaaaacgtgagtcttcccaattcaaatgatttaatgaagaaaaaaaaatccctcatggtcttttggtttttggttaattcctgatgtagtaaagttgacaaccaagaatagccatcgtgctgggtgttagtggtgctcacctttaatcccagcactttccaggcagaggcaggtagatctctgagtttgaggccaacctggtctacagaatgagttccagggcagccagggctacacaaagaaaccctgtcttgaaaaacaaaacaagcaaaaaaagaatagccatggcaatgtgttagtttagcaaggtcagtgaatagtggaataaatctgccatgggtcctaagaatctttgtacttctagccaatggtgcatggtcctgagaggtcttgatattgaatacataggcaattaaataggtcaactaactacattaactatagtaaaattttgttcctctgtagaggttggggctcagctttatttgtggcgtaagaaaagaactgagcccagtgttggtggcgctcgcctttaatcccagcacttgggaggcagaggcaggtggatctctgtgagtttgagaccagcctggtctacaagaatgagtgccaggataggctccaaagccatagagaaacaaaacaaaaataaaaaagaaaagaagtgaaagactagagatacagctcaatggggaatgtttgcccagcatgcccaggcctgagagcccagaaatgcaatgacttcaatgaattaatgtttaaaaagaatgctgagggattacatatatatatattatggttcttcaagacagggtttctccgtgtgacaaccctggcagtcctggaactcactttgtagaccaggctgtcctttgagacctgcctgcctgtgcattccaggtgctgagcttaaaggcatgctctaccaccacccggcaagaaagctgagtctttgccctggtttcctcagccctggcaaacctgttgtgtgtgccattaactgggtccattgtgtcatgcttgctgatttgggggcaggagagtaggctgctattttgaggttcctactgtttactgatcactgtttactgttcacttttggtacctatgtagttgtggcatcctctgaacagtgttatttttcttaaaaagccaggtgatatgaagtctatgggctctataatctctattgataaggggtgaacttttcactgtagcatgaaagagctatatgtatacacaatacctaaatgtgtggacagggtgatttacaaacaaaaaagcaactggcccacctttctacggcccagagtgggagtgtgtataaaggcagtgcagatggggtacaggaccagagttcctttccattgcctcagttggccctggcccttgctagaggggccctaaaagttccagttaagactagacagagtgccagacagtggtggcgcacgcctttaatcccagtgctagagaggtagaggcagtcggatctctgagttccagaccagcctggtctatatagctagctccaggacagcctccaaagccacagagacaccctgtatcaaaacaaaacaaaacaaaaagaccagacagagcattgcagcacccacctataatcccagtactgggtaggaagcaaaggcaggagaatttgagacctacctggcccacacagggaaacctgtttaaccaaacttaaccaaactggaacaaaacaaaacaatatgccagtggaaggcataaggcataaacagaggcagaggagccaggaaagcaaaggtgaaggtgaggagtagtggagggaggctgtctacagaaatttctctccccaggtgaggaactacgttttcccttcccccttaggtctcattgagaagtaacaattactgtcttgggggctggagagatggcttagtggttaagagcactggctgctcttccagaggacccgggttcaattcccagcacccacatggcagctcacaactgtctgtaattccagtccaggggatctgtcacccatagtcaaagcaccaatgcaagtaaaataaacaaaaaacaattacaattactgcctttagaccaaacggaagggcccagagcctcacccagcagccccctgctttggtagccataacaggcagcagaaaagacccagcaagatgtaggcctctgactcagcaggatgtgccgaactcccctcccacttccccccttgcccaaccttgccctaattactgggataaactgccagataccctccatgtggtaaggaaccagtcagaaattagttggtgggctttggatgtggtttacggatagtagtgaaatgcaggtggcttccagacacagcaacctttctgcagctgcagcagaccaatcagctcaacacaggttcccccaacccagagttgtgccaatcctgagactgttactatgcaactagcagacccccagctaccccacccccctttctgctccactgctgctcagggttcctcctactccacctgctgtgtcaagggacagaggacccgagttaactcgtgaattacaaagactcggcttttgcatcagatctggtctcttggtggttttagaggttcagagtctgggcacaacactactagctacggttgtaacactgttaatacaagttagttatctccccccccccccaccccagttgtttgttgcctgcctgacatactttaaagccccgcagctgagtcaacctgagtcccttcagacaccttactctgccactcccctgcctgcaacaacatgctcttgatgcttcaaattgcaaccagggttcatagctccacttgttggaaacgcctctcagttcccacttgggtgtatgcagtttcccctcaacacccttgctctttgggggttgcaggaggatcaccttatggcacccccccttttttttttttttttaacttgtactcctagaaagggccctcttcttccgacggttttggtgtcttcagcagtatctcgttatgccaatctgccctccgccccaggcaagcctagggcacggcagaggcataaggcatttgtttttcacaaggcaaggggaaaaaagaatggtgggcccagggctgatccttcgatcacactgccacaccgggccactcaggcccatcgccagggcgctggggatagagttcgagagctgctccggtctcctggattctctggcttcgtacaaaaccgtcatcctcgcagagactacagctggcggttggcggcgagcgcccttccgcgcgcgtgcgcagcagctggggtgatcatagagtggcatggacaggcagagcggccagccccggtcgctcagtgccccgcttccggcagcgccacattgctccaggagctgccgcgtacgcagtttccatggggactgaacatggcgccgcgaggtgagactccggaggtgtgtgtctctgcccctgtcccatcggtacctgtcagtccctccatctctctgctctccagagctggacctaatctcccattcttaaaagccgggggtggggtggggtgaggtggggtctcacttcatttgtccgaatcaggctttcgtttccctgaccatcccgagtgcctacatgtgcagaactcggatactgtacccttaaaaatcccgggctggccctattttgggatggctcagttacgaatcctctggccctggacagacacgttgctggtctctgcgccccaatttccccttcagtagtgattgcatctttgaggtgcctctcagccgtgatgatagctgaattgccagaaaagtcgacctgaaagtgattcctgggaaaggaggtcggaggctgcccccttcacatcaacactttgacttcataagcaaccagaaatttatctgtaattcaccatgaccttgggttttcttcagattacacagaaccgtacagggagctccagctgcccttctgcccattctttgtgttgctttttttcagataaaaggttgtcctcaacacctctggaagtcctgttctttctgaatgggtggtactatgccacctatttcctgctggagctcctcatcttcctgtataaaggtaaggctgggcttgactgactctgccccaacaactctttccactgtagcccagcgccaatacccaccaagaaccttccatacttttctggcccctgaagcatttctctttattgcaaggtagaagtctctccaactgatagctttagaacgattcagtaggaaatttctcacagcaagaatatcttgaatttgggaaatgtgggcttctccattctgactcttccccatctctctttgctgaaataatcagatctgtgtatctttataattcagtcatttggcagattggaatccccacagacttagaaaaagagcccaaatctgtaacaatccacagcttgctaagtcattcattggacgataagtagcgcccttgttgttctgggtgtgtggtagtccttgtggggactcttgggtggtgtttgcatactctggcttttatactggcaggtctcttgctgccatacccaacggccaacctagtcctggatgtggtgatgctgcttctttatcttggcattgaagtaatacgactgttttttggtaagtgttgttcagaaaatatttccattccttatgagacatgctggagcctgtaacttgattaacaagaaaaagaacacaacctaggttcactattagaggctggatctggtaatatatcccattactgcttccctgaagcttcaagatgctgctccatgtcttaggtcaagatttacctgtgagtttctgaatggggctagcggctggcagtagcatttgatcttagatcattccttttccagttgcctgactgctacaagagttccagtttctccttgtgaataaagcattatatgcctaaagagctctaagattccctccacttctctaaataaggttttctctgaagtttttaaaccccagaaagagagaaaaaactcattacttacaacatatcatctctgaaaacagtgttaaaatacaaacccaagaaaaggaaatggtaaagggatactaacagtcaattcacataagtcattaaagaggaccaaaaaccttgccaaggtgagaatgatgaggcatgcctttaatcctagtattcccaggcagaagcaaggggatctctgtgcattcaagggcacatagtgagtcccaggacagccagggttgcataatgagatctatctcaaaaaaaaaaaaaaaaaaaaaaaccaaaaaccaaaacaaaaacttgctaatgtgctcaaatgcagtaaagaaaagcaagctcaaacaggcaacattttttttttcacaaattacattggcaatagcaacagatttatacactacagaatccatatttggcttttggaacacacaatttttttttaaagatgtatttatttgttatggtatacactgttctgcctgcatgtatatctgcacaccagaagagggcacaagatctcataaccgatggctgtgagctaccatgtggttgctaggaatcaaactcatgacctctggaagagcagcctgtgctcttaaccactgagccatctctccagccccctagaacacacaattttttaaattaaaatgtattttatgtatatggatgttttgcctatatgtctgtctgtacaccacattgtgtctgatggcgacagcggtcagaagaaggtgttaggctggagagatggatcagtggttaagaggaggtttttgcaggaggaccccagtttggttcccagcatcaggcaacttaacaattgcctgtaactccaactcaaggggatccaatgttgtcttctggcctttgtgaacacgtataaatatacaagtaagaattaaatggaaaaatagaagagggcatcagatcctctggaactggagttacagactattgagctgccatgtgagtgctgggaattgaacctaggtcctcaggaagattagcaatggcttttaaccactgagccatctctctctccagtcccaagtagcagattattaatgcattttcttttttcttttctttttttttttttttttggtttttcgagacagggtttctctgtggctttgggggttgtcctggaactagctcttgtagaccaggctggtctcgaactcacagagatccacctgcctctgcctcccgagtgctgggattaaaggcatgtgccaccactgcccggcttaatgcattttctatattttatttttcattagttgaaaagtatatatatatatgagatatatacatcatagattttatatatacaattttataagttgttgttggatacaaatgcatacatgttatacacacacacactttggttttgatattttgaagcaaagagaccaggataatcttgaactttcaattctgacaccttagcctggctgccctagattctcaatgtagaccaggctggcctcaaagtcaagagacccacctgtctttgcctcccatttttttttttttttccttgatgcagaatcccattgctccctgagtagagtcagaatggaagcagagcctctggagtaaatgacatcaattatgtaacaccctgaagcttcaaatttttagttcagttggacttcacttttaagtatgacattcccactaagggtagtttttctctgctctgcccatctgtcacatccagatactttctgtggtgagtaaaaacaggctgatgccagaaaaagcaatcaccatttggaggtgactctgggggttgtgttttttaggtacaaagggaaacctctgccagcgaaagatgcctcttagcattagtgtggccttgaccttcccatctgccatgatggcttcctattacctcctgctgcagacctatgtactccgtctagaagctatcatgaacagcattttgctcttcttttgtggttcagagctgctgcttgagatgctcacgttggcgaccttctccaggtattactgctgaaggctgggtcccccacccagggatggatgcattggtatttgaaggcctgaaaggtgtagaaaactggatttgagggggtgtctatggagatgcttttctttcagtaggtaggaaggttgagtgtgtgtggtctacatatatatgttcacttgtgtgcgtgtatacacaaatattcgggtagatggttgtgtgtatgggtgcatacgcatgtgtgccatgcagaccaggggttgatatcaggtatcttcatcaatcactttccaccttatatattggagagtcttccacttgaacccaaagctctccaaattggctagtccagctacccaacataccccaggaatcccatctctcctttcatgggtgatggtcttcatgcttgggtggcaagtacttttacccactgaaccatctcctcagtcccaaaagtttcttttttaaggaagatagtcttctggttcttttagagttaagagcttcaaatatgcagagttaaagctaacagctgttacttaatggtcttttttaaaaagtaatttaaaattttttatgtacattcatgttttcctgcatgtatgtctgcatgaggaattcagatccactacaacttgagttacaattttgagctgccatgtgggtgcttggagttgaacctgggtcttctggaagagcagccaatgctcttttttttttttaaaacatttatttatttattatgtacagtgttctgcctgcatgtatgtctgcaggccagaagagggcaccagatttcactggtggttgtgagccaccatgtgggttgctgggaattgaactcaggacctttggaagaacaggcagtgctcttaaccattgagctatttctccagccccacagccaatgctcttaattgctgagccatctctccagccccactcactggtcttttaacagtttctttttttctgcctttagtatggacaggatctgaagtataagaattccagctggtatagcccatcaggatgacagcccacatcctctggtacgtcagccacacttgtgaaaagtggtaggtcaagttggcctgggaaaggttgtgtggtttttccttagcacagacatctgggcattgagcacctacctgaggtcagtggcgtcatcttaaaccaggatcatcagcaggagacacggacattttatggtagggagaggcaaagctgttgacatcttgggcttcctaacagcttcctactgacctcaagttctcttccttggtcatcatggccagagctccttgtgtggattatatggcttgttgggcttccagtaggacggaagccacagcactctgtacatgtaccacatctgtcctgcatgagcatgaagagcctcatgatggtggcctcctaggctgattcaaatacccccaccccccatgctcagagatggagatccagaacccttttagtagttcatagtatttttctattctgatcatgaagcaaacagttttataataaacattattttctgatgtggggctggttatgttttgtgtctggcacctgtctttaagtttcatctcttctaagtgagggcatagactatcccaacagtgtgttctaaggctgtgtttagtggtaaactgtgacataaagatagtgatagaagtctctctctgatccttactcctcatgcccaagttgcagcctgaatgccaaaaggcactgccatcttgtctgtctgcttcaggtctgtcattggcaaaagactttgtatatgttcatctctgccccaagtctgcttgtctcagttctttccagcataggccatgtgtaataagaaactgagagaagtatattctaaaactgaccaaaatctttttccttgagttagcttaaaaggaacatgtatttctctgagtattgccatgttattttattccaagaagctacgaggagttgtgaaagtccattttaggactctttatgtgcatcagtgtgaaggtatcagatcccctggaaatggagttacagacagctgagttgtaagttgccatgcgggtgctgggaattgaaccccggtcttctggaagaacagctagtgctcttaaccacagagccatctctcaagtgccccagaagggcctttgagactgaattcctccactttataggcttagaagtgagaagtaaaagcacccgtggaactctaagcctgttttacaagtcattatgcacaaagtaaactcaagcagatacccagccagggcacagtggtgtacccctacagtgccaccgaggatgaggtttaatggcagaacatgctgattaggacatatggaagcttagtccactggttcccatgggtggctccttgttcttgatgctgctggaaccacttgaatagtcacacaaaagagaaaccaaggcagtgactggatgtggtggtatatcttagtgtttggaagcagggatgagagggtcacagctttgagactagcctggggccccatctcaacactgagctctagcagtttttcttaagatcacagcattttactgtgatcatgaagcaaacactataatacatgtttacaaatcttttaaagtgtgtgtgggggatcctcatgtttacaggtagtttcaaatgatccccctgtttgaaattcctaagtgctacgactataggtataccactccatctggctggatttttttttttttttttgagacagggattctctacttagttccacttgacctcaaactatcctcctgctccatttctttcagtgttgaaattatatggtctagggagttcatgtggcgaaaagctgtgcttgtaagggtaaggcaagctacttaacagacctggaggcacccacattctgagaaagtacaaagtctttggtggcataaaaaagcatatggttggatgttaaatagatggatggagcaaacctggtacttagcaagcatagcaggtaactgagatgcaaatgaccattgaccccaatgtgaaaacacatatctcaatggcgaggcactagaaaatctaacccccttcaaggaatttctgcttccccctgagagcagtacacagtatcatctggtctgcagtttatgtttttgtcatgtaagcctactcttcacttaaaagtgacttaactaggcatggtaatatatccatgtaatcccagtactttgggaggtgaagctcaaggatcactgtcagtgtaggacgtaagagactcttaaaaaaacaaagggcagggctggagagatggctcagctgttaaaagctaggctcacaaccaaaacaacaaagggcagagctaggcaggggtggcacacacctttaatgcagcactcaggaggcagatctgtgtgagttcaaggccagtctagtctacagagttctagggcaggctccaaagctacacagagaaaccctgtcttgaaaaaccaaaaccaaaccaaacccaacaacaaaaacataccaaaaaccccaaagggctggtgtgaaggttcagtgggttaaggcagaaagcctgaccagagcttgattccccaggaacaacatgtgtgaaagtcaacaaagtttgcaagttatcctgacctccagatatatgcctatatgcatgcatgaagacaggcaggcaggcaggcacgcactcatgcacgcgcgcacacacacacacacgtgcatgtaaaaaaccaaacacaactcccaagtgacttttatggattctaaatctgattcttccattcaggtttagatatcaagttttagggaccagctcaacatccttgggtagcagtatcatatttgtctaaacagtaaattggtaaggtatgactactttcccagtgggcctttatctgtactgctttaaaaaggagagctcttttggaaatccctcagtacttctaagttttctagtttctatgtctcatttagatggcaattctgttcacaaaacgcattcattatgtgattcttaacacatccttaacacgaaggcagaacagcagttactctcatttttgatgacagaccaaggtcatattgcttgcctatggttaagcagatggaggacctaagcactagcacccaggtgttcatgccaatctgtgcaccaccagagctccacagggcaggaaacatgatctgcaagtaatacttgagaaccacgagtggtcaggacaacttggaatctctctttaactcagggaaaggacaaacaaggaaaagttcaaattgtacttctagggggctccccatgtcagctacagctgtggagaaacgactacccatcaccaagttacagttaagaacctcagtccacacccatgccccagacacctcaacaaatctattcaatgcagaatccgtaaacagctcacaccccatttattatttaaaaatattttgttacaaaaggaaaaaaatacaatgcagtataaaagattgacatcgtcatcaagtttattacacaattttcaacctatcagaaagacaaacaaatcaccgacaacagggggatggggccttgacctttgagggctgggattttttttttttctccttttgctatgaggaataaaactaaaaattctgtcattgagtaaaaacaaaatggggagaaaacaattctctgggtaaatagcttttctgatattatatatatataatatatatatatatatatatatatatatatattgtttttccttaactgtcacattttaaaaagacacccaagctgctttgaagaataagcacaacacttggccaattgggcagggtgccatgttctgaagtggaattgggactggcttggggacaggaaaataagctacaactgtagcctctgtcccaaggttatgtgtttctccaaccctgggggctactccctcagtgactgaaggggtctatcagaagtgttctgggaagaaaggatccaattcagtctctcccctcttgagtctgatggttctccagtgaccctatgcctcacaaaccaagtctcatctcacatgccatgtctttccacattatatgtcacagaccctgcagatgcatgcagaaggaacatcaccctatggtattccaggactgaagctgcctcctgcaggagcaacctatcacaatttggatgctgagaaaagcaattccattggtctgtgcagaaaacagctaccactgtgctggtccttagaactctgagctgagttcacttaagtcaggctccatttcttctctgctctttgtcaaaggcaggaagcacctccaggccaagtaaggggagtattatagtaaaggattaaaaaaaaaaacaaaaacaaaaaaaaaaacaccacatctgtgactttacctgcctactagtgctgagttatcccacaataagtcaaagtatgtaccgtggggatgcaagcccaagcttacatcaaacctgaaaaagaagagcccatgcgagtaggccacatcctgctcaaattgctttcttccccacactcctggtacttaacaaactaggggtcctcattattgaggtcccatgacatccctatgttccaaaggcagtaccttcttcctctaaaacaaggaagaagccttcttgggggaaggattccatgttaaatggaaagcctcagggaaagggaatacctaagagctggttattgcaacagacaactgagcctgaagcagcaaatggtggtaactggcttggctaggtttccaggagaaagcaaccttctgggttttgcttccgaggggcaagtccactaggagtcagatagcaaggagccaaaaggattcagccctctagaaggccagggaaataaactgtcaatatgtgagaagagaaaacccagaacagcagcttgtcacaaggtagtttctgttctcatggtccctcctcaaagggccaggaaggtaaaggagttgaacaaagaagtggtatgttagcagggtttggaccctcttgcccccaccaaatctagtaccaagggcagaaccctgggcatttttggcacacccagtcagtcactctcctaagatcccacaaagaggatctccattttctctgggaagtaagttttcccagtaatctcaccattgactgctccgggggaatcagaaactcaggtttcctcagacaaagcaccgttctctatggagactaggggctggacatgttgctgtctttctgtctgcccccatcccctaccccatcaagtctttaggttcttcccctcgggcaaacaggaggtgtgggattgggagggctgccaagccatcttcaatcctgtagggcagagggtattgcctggaggaagttaggggtttggaagaggggaaaggggtggagcggcctccgtcctttagtcctgttcaaggtgaggagatgcccagtccattaaaaacaatttggttccacccagactcctgcaatgaaagcaccagaagagagaaaacaccagttagaggccaccctctcatcagtaagggcttctatgagatacactggcatttcctgaaatcacaacctaagtcagaatgtaggcagacaacacaagcttggcaaagtagaacaaagtggactgtctggcattgagtaatgtgaggaaatgggtggagagaacacaatgagtagaaactaagaataaccaaaatgctgacatcttttagaggaaaacagacaatgaaatgaggtctctgaaagctgtttgaaagtatcttagtggggaaagatggaaactaacatttcaagaaaagttgcaaggaaacacagcttcagaaaatccaataccctaagggaaagaaaacaaacaaacaaacaaaaaaaacgagaaagaaaaagaaataggagaaacaatagtaagaatacaaatgtgtatatcaccaaatccatcgatccccaaacatcccagaggccctagcaggaagcatgcactcccacagctaactccttaatatctggtttttgtttttttttttaaagcagcccaagctagaacagacttcaaaaccaaaatgcaaacacacacccacacaccttaaccaaaaacccacaaaccaaaccaaaccagattccaaacagtatgcttattcgtgtacatatagatacacagcaccagagcctttccaggctgtactgaataaaatgcaaatgattttaagactttccctagataacagttgtggatgaggatccaaaagaataagaacactaaccaggaacgagctggctaagtcagaaccaaagcagagcccggaagaggaaaacagtagtagtcagcatcaagagcagcggacagcctgttaagaacctttacacccagcaggaagggtctgccaggtcacttaccacattactagtccctagatgatatgaaacagaaccaacagtgagaaggaaaggggagaactaaattcaggtgtaaagtgtttactaaaccaaatctggaactgcagccatacacaaatgcttaccctttatatacgtatctttgtaaagaagcctcacaaatcttgtaagaaccacccaagaagacacatacaagcaaaagatatctgcatgctgcctcgtcctcctaaccctcagatggtactatcttagtctgctactcagaatctgcagatctttgcctccctggcttctctaaacataaacccaactttgtcaaactaaagctcttagtgccttctttgtttcctgacattctggcttctgaatgttttctccagacaaggtcctgctgtgtagcttaggcttgctttgaaatcatgatcctcctaccttagtcttccaagtgctgggattacaggcatgtaccatctcaattggctgaatctttaagcaggatcaaacttgaacagaaagcccagttttcaatggaccaggaggatatggatgaagtgagaatgattctatttcaagtaaacaccctaaaataatgggacaattatagagagttgaagacacagaccacctagaataccctcaaactccaaagcatacacatacatgccctgaagaaaaggcatttgtgaagtccttacagaatgagatgcagagaataactggcacaccaaggcaactggtgctggcagtagtgcctgaatgcaaacagagtcaaagatccatcacttcagttggcccatcagcctgaagcctcagagctggggccctctcctgaggaacagatgttgctgttccattgatacccctgcacaaaacatgcctttcctgattagggaacacatgttcatagtatagaaataaaattatctttttaagaaaagatgttgtaaatgctgttcaaatagtttggaggattaagttctttacagagaaatctgttcatcactttaccaacataaaaccttctaagctacaatttagtaaatgaagatagaattcagactaacatgaaaattaaagatgaccccccccttactctttaaagtgtctgattcacgatggccagtggtggtacatgcctttaattccagcacttgagaggcaggcagatctctgtgagtttgaggccagcctggtctacagagcaagttccaagacagccagggctgctacacagagaaaccgtgtttggtgttggtgttggtgtagaatgggatggacacacaagagaaacatgaagcttaaaaaataaggacagagaaaggtgtagattgaaaacattatccaggcagtggtggctcatgcctttagccccagcacttggcaacctccaaagccacagagaaaccctgtcttgacccccctccccccaaaaaaagaaattagtaatttttatcattcaatttactttctgtggaagacaacaaaaacactctcagctataaaactgtttaagtaaagtgccaggtggcttttaatcagttctcaagagtcagaggcaggaggatcttcgtaagttcgaggccagcctggtctacataataaatcccaggacagtcaagacactgttgggctggagagctgcctcagtggttaagaacactagctggtcttccagaggtcctgagttcaattccgagcaaccacatgatggctcacaaccatctgtaatgagatctggtgccctcttttggtgtgcaagcatacatgcaggcaaaacactatacacttaataaataataataataataaaaagaaactatctcaaaaaaccgaaaaagataaggtacatataacacctgtaacaaagcagagggcaaacccaagggaatgctttcttgtctgttagtaggcagaatgctgcagaattttcgaaaggtttaagtttactttgatgaataaggggtaagggttcccagtcaccttcatccagtcatccatatttaagatctacacagcctgctcaactatattatttgagaacaatcaagcagacaacagatgagacatatcctcctagccacattcttgtctattttctacatgtccacagaaacagaaccaacatctttcctacaacaaaaacaatccttgttagcagctttcagttgggattgtaaaatggtgggaaaaaactccaagacctataggctcatcctccaagatggaaatctttctgtgaatgaaaataacgcagagctgagagacagggagcctaagtcctgctgacacagttccccagccagacaataagacctaacttcaattacccatgccaattccctgacactcctgcttttaacaaaattactaaaatcaaaaatatccttttattataattattcatagggtctctaaaaaaagatttttcagaatggtttttctattctaaaattctaattttcaaaatctttttaatggatatcaattcctgaagtcattagtttcatgacaactaaggtaacaatctcttctgccttggccagttttcccttttacttgaaaattgggattaaaatgtaataacgataataacagtgattttcatttattaagaactcagaggagagagaggaacatctctatcacaaatctttttgtttcgagacagggtctcactttgtagtccaggctgcccttcaactcatggcaagcctcctgccttgacctcccaagtgctgggatacgggcatgagctaccacacccagtttgcacttaatccactggtcaggaacagggcttcttcccacctttctcagtggtgccggtcccgttctctatcccggtgtctctcatgctcccggttcctctcttggaaataatcatcatgccggtcttcattatgaagcaagtctcggtgcctcctgctgctctctcgggacctgcttggtgacctctccctggaccgatgtcttttcctgtcagagagatccatcagtctcaactcaaagggcctaccacattctttccacatggggtcttgtatcttccagtgtttgcttaaagtattcttagttctctatcacggggtactatatgaggatcttaacaccctgaagcctaatctttatggggtatttagaattttgcaagtattatgatttcatctttataacaggtctgtgggttaagtactaggactttcacctcaaattcttagaacgttgctaacttccatactcaagatgggtcaaccaggtagtcagcaatagaactaagattcaaaccttggtagtcagcaacagaactgatattcaaacctaagattcaaaatcctcatgtgtccacttagtcccattcccccttttccttgacccccatggtgctgaagattgaacctagggctccatgaatgctaggtaagaaatcctggcatggaagcctgtgttctttattggtctttctttccctaaatgaggcctctgcttctactgaatacaggttccaaacattaacaatacttaatgaaaacgtctcattaatttctcctccttaaagactcacatcaaattaggttccttcttcaatccagactcttatcagataccctgggtttccttcttttcccaaccaacctgcagaagagtattgcccaaggccaatcagccacccaaaaaatcaactcacctggaagagcttccactggcacccacaccgtatgacttggcctctatgccatgaagacagtccttaagagaggagatgaggacccggcaacgctcatcattggcgactcgagactgtttgataactgcaatggctgtgagtagtgtctcaatggcatcactgtaatcccctgataggatggagggaaaggccaaagatgagaaaagaccataaccaaactggaccaaaaggagaatgcaggaggacataaattgttagtgactggctgttttaaagagccacagtaaaatgtacaaggcagacatagccgggcgttggtgacgcatgcctttaatcccagcactcgggaggcagaggcaggcggatctctgtgagtgcgaggccaccctggtttacagagcaagtgtgccagcataggctccaaagcttcacagagaaaccctgtctcgaaaaaccaaaaaaaaaaaaaaaaaggaatgaactgttatagtacagttacgtccaaaatataggaagtgaaaagattaaaaaattaattgcttttttagctgtgtgtggtactgggagttgaacccagagttttgagcaagctatgctttgtcaccaagctatatatccagccttgtaattcatttttgtaaaaaaacaccaaaatcattcatacgttatatataacatgtgcactgcctccaaaaaactggaggaatacccaccaatcatagaaggtggtcttggtggtccttcaaggggttttcattcattcatttttttaaaaaacaccatattgagcctacacattacttatttcttggccccttccccctccccaagacagagtctcactacataactctagctgtcctgtaacgcactatgtagatcaggttagccttgaactcaagagacctggctgaatctacacattattctaaatttataatcagatgtgtagtttttttgtaactcaagacacctttattacatgcatatataatgtaaaactctattatgtgtatatacaatgtacagctttcaaggacagggtaacatactgagaaatttgctgttgggcaatttcatcattgttcaaacaccagagtgtacttatacaaattcagtatatataatacaaattcagtatatataatacaaattcagtaatatataatacagtgtatatatataatatatataacaaacacacaaaatttctatgggaccactatgctgtatgaactacctaaatattccctctctcttacacattcacatctgtatatttaaaacgtcatgctgccctcaataactaggactttttcatttcccaaatgtgaccaccacctgactcaaggatagggctacacagaatgagtatttcaccattgcttttacaaggaaaataaacagcactaagtaaagaagataaaagaacagatccacatattggtctgctgaaaatgaaaggtgggcggctttctttatacaaagaacagaatggatagaaactaagaaggaagtgcagcactgtgaaggaccaggaacactggtacatcagctccaaatagacagtgaagttttatctgttttagaggcatagtgaataaatattacagttcctatgactgaaaaaaaaagaaagaaagaaaaggcaagggaataaatattcattagtcatgtcagtgtgaagggactggcattgaaaaagggataaagactacttctctaaactcctctgcatattgtatagtaacgattgtgcattatttcttaacttaaaaatcaatgtatgtttttctggtgggggagaaactgacaagaacacatacttgctgtttttaaactactctgtggagtcaaactgaaaccaaagatcagaaattaggaaaacagattaacggcgctaacttacttctttgggtactgacagtccacatacatttagatccacgtgggaaacccccaggaagaaagtgagcatgacttggatcagagcccccaacctttctattctagtatgccaggccattgctctgccactgagttccattcataaacttcccattctataccctcctcttttatgcccagggctttcagaatggtagctactgattcttctgctaatgctgagagcagggcaagttagctgcaagggtgtgatatgccttaggatggtaacaaacttgtcttcctagaagaggctacccacagactactagctccacccagattttagtctaacaggtccattaccatagcactatttagctgaggcactaagtctaaaaccctggggcttttcaattctacttggtcctggagttaccgaatagacacaaggtctaaagattagttctgagataaggatctcccagagatagcaattacattctacaataaatataaaaaggaaatagtgtctattactcatagtgtagctactgagttggtttctacagagcaggtctagacacatgactagaccttccccaaagccaagaaactacgtcaaatacttcgtttgaagtgcatatcttctgacatttaacagcattccaatttttcaaacttttacaaatggaaatgacaaaggggaaaatttaagcaaaggcagtaagtaagggttaattacctgcactggctccagacactgctttggaaatggcactgctggaaattgctctgttacgcttcattatctcttcaaattcagcttcactcactgtagaaggcggagggcctgaatctcggctgcagagaggtaacaccaggtcagactacccacatcctttattacttttcaccatattctatagtactgtttttcaattcttctctaggatatgtctcaaatgttcatttttttcttcaaggtcaggatttatgtcatatattatgttcataattttggtttgactcaaaagtaataatcactgtagcacttgcaaaagccatttatggcaccaagtttaatcaagctacttaaacggagttatgaaaaatatgatttgggtcaggtagggaaggtgaaaacaaaatactaaataaaaaaactgatggaactgggggaattaacttagccagtaaatgcttgccaggcaagcatgaaaacctgagttcaaatgcccagaatccatataaaaataccaggaataggggaggatgcttataaccccagtgctgggaaagtagagacaggtggatctctggggctcactggctagccaatttaatctacttggtgagctccagaccaatgaaagactgtcttaagcaaggtgaacaacataattgaagatgacaccaaatgtcctttggcttccacattcgagtgtatatgagcacacatgtaggggctggagagatgactcagaggttaagagcactgactgctcttccaggggttctgagttcaattcccagcaaccacatggtggctcacaaccatctgtaatgagatctggtgccctcttctggcctacaggcatacatgcaggcagaacactgtatacataataaataagtctttaaaaaaaaagagatgtttaaaaaaaaacacacatgcagcagcacacatgtgcacttgcacatacaggcatgcaaaacatgcctctgacagatactaatctatatcccaggactcaacatcacaaaattatagaggaaacagcatcagcattcagtactaattcatatgtactaattcatataaaacaaatgtctaaaatactcccctccaccctcccttcttccctccctctctctctctgcttttttttttttttttttttttttttttttgagacaggtttctctgtatagttctggctgtcctggaactcactctgtagacccagactggcctgcctctgcctggcaaaatactgtctattaatttaagttagaggtcaacctagtctacatagtgagaccctgtctcaaaaaataaacacaaaagccatgtgttgtggtgcacgcctttaatcccagaacttgggaggcagaggcagctggatctgtgagttcgaggccagcctggtctacagagcaagttctaggacaggctccaaaacaatacagagaaaccttgtctcaaaaaataaaaacaaaaacaaaaaacaaaaaaacaaaacccaaaccaaccggccaaccaaccaaccaaccaaccaaccaaaaaacaacacgtaaataaaaacactagctactatcctggctcaaatctgcagggaaatagttacctgccatggtggttatagggtgtagaggccttcatataagtatctggtggaggccccactgtagcatttggtggggggaagaaggctggattgaggtgaagggctggtggaatggccccagggggaggtacagccagatgaggaggtaatcgaggaggagggggcatgagatgctggtagtggataccaggaggaggaggggggacaccaaagcttgaggagagaggtggtgggggtggaattgggggtgggggcagacccatcaggggaagggctgaaggaggacggttaaagtagggcaacacgctggggggcttatccacacgagcagatgagggtacaaggttctcagagggagttgcccgtccatcagcagaatcactagaatctctggagtgggcccgtggaggtattcctgcaaagcaaaacagagctaatgttactgcccaggcaggttctggacataacaacaggaccctcatccctcagcaagtcattggtcaccatactgaagatgacaagtgaagcagctgagagaagcagcaaatcatttggtgcctttctgttggtctgagtggaaagaatgacaagtgaaacagcggagagaagcagcaaatcatttagtgcctttctgttggtctcagtggaaagatcagaagtatctttttaagacaaccctccaaagcaatatgattcctaagtcctgtatgtcaaaggatcctcaaagtgcttagaacacatttaacccttaaacatatttcctgttttcaaatacattccaaacaacccatgagaaaatgatgctgaggcattctcactgatgttctgctcgattctacctgccctgaaatcctatatcccccagagttcagagactcttaaggctactacaagtcgaccttctttattatgctgtactctagaaaaattctctttgccatagaactctggtcataaaattgaaaaactatcggaaaagcaggagacagagccattctctattcacataattcttagagagccggctttgctttcttgaagtagaccacaacagaacatgatagtatagccttgagagtcttgcaggtagaaaggtgcttagcaaatatggaggagaaaaagaatgctttttacagtagaacttacagtcagggccaatgcccaaggcaagcctatggtgggaacaactacactgacaaccaccttgaccttttcactgtgggatattgccagcctgacacaggccccgttcttcatgtttcaaacacatgacaagctgttcctttctcaaggtgttataaactgaggaggtttcaaagcaagtgcaatcctctataacagttaaccactttcttaggtactgttccaatactgacatgtgtatttttagttacaagtcctcagaaaaacagccatttttaagtagaagtccaccagttttattctttttagcaaagtaacatatatgaggaaaaagctgagaagaggtagaattgttactctcaatacagctgtaaagagatatgtccaccataggagggtggaattgtacaaagactctgaaacagaagggtcttgaaaatgtgaattgtcaaggaagccaagtatgtgcctttaacccaaggcaattggagctcacacctcatccacctaggctgtcaatacaaaggacaaggacaattgtttctattcaagaggctctatttccacaagaagagcatacctcattcatacaaggaactactattttagagctaggtataagcagtgacagcaggtatgtgatgagatgttgttgccaccacctatcccctagtagtgaatgaaaaggaggctgactatttcaggcagggccttgcagagtagctgcactttatgaggtcagagtaaggcaaaattggtcctcaggtttagaaatctgattttaataattcaccagggagtaatcagaccccaggagattgaattatgccaaccaaattcataagaaactgatacaaaaaacgaagtagtaatttattagttgataatgacaaatatttactgccaagcagacgggaatacttgtaggctggtcagtgcattctcttcccagaaggaaagcctcactaagagaccaaggtagtattagaagctggtttggtgaacacagtcagattaaagggagtaagatggacttcttaagggatcaaactaacagaatgttgcatttaaaaataaatttttaaaaaattattatgtgtatgggtaatttgcttgcatgtatatttgtgtaccacatgcatgcagaacccactaagatcagaagagggcactggatcccttggaactggagtgctctggaagaacagcaagtctcttaaccactataacccatctctctagccccaaatacacccccaccctgagacaggacttctctgtgtagccctggctgtcctggaacttactctgtagagcaggatggcctcaaactctcagagattcacatgcctctacctaccaagtgttgggattaaaggttcaagtcaccattgcccatctgcattaaaacaacaatacaacaaaaactaatgtgatacacttgccaaaccaagtattcaataactgtttcctttctctaggataacaatggagaaacaatgcttaatttttattatctaacacttcttttggtggatttttaatagagcactccacatatatattcacagtaagatcacagccacatttgtataccttaattatacttcaggttgtctgctttttgaaaactcaagagaaccacatcttacttaaaaagcaagcccattcaaggtgtatccatttatggaagaaatagaatcgacagtttataggaaccttaatcatttttcagtttcaatgagaaagaggacctgagcagtcaactatcttgttcaaaaggtcaaaagagtcaaaggcagaacccactaacaacttgaacctgactcccaggattgtgctgttaccacaaaaatctcactcttaggcctatccactaattgtgccaataagctataaccaacagtacccttcccccaaatactccatatcagtctgagcccataccacaccaacaagcccacaacctcccccccatcatacagatggtctccacgtaccccctcttgggactcggacgcactcacgtttccgagcctgcgcctcaaattgtgataagttctgccgggtggctggtctcacatccactttttctccattaagaacttttcctggcaagagttccagcaatttgtggacagaattttcagaggctaccaccacctcagcatacctggaggaaccaagtaaaaaggagaaaagtatttagacactggaaaaggaacaaaaatttctattttacaaaggaaaaggcatcttgctatgttaaatatttaaacacacacacacacacacacacacacacacacacacacacacacacacacacaaaatcaatcaatcaatcacaaaatcagtttcaatccagctaggtcctcaatctatagcaatgtgtcaaaaccaaggtagtaagctaggctggggtggaaaggaattggaatccaagttcaaatacattacagatctgttaccctaacagtcacaaactaaaggagaccacccaaatccagatctcaccctttagactggccatttgcacggttctctgcaaattttaactccaccacatcatagactcctatagagcgaataacctggatcagctgctggtctgtagtccactggggccggcaagatggaaaagggagaaatgtcaagagcaacatgcctgatacccacccacccagatgtcccaagtcctgttcccacatctaggactccagccacaaccactgaccgcccacaggaaaccctaaagcccagtaatatttcaatcagtgcaggctttccccattgtcctgacttctaaacccatctaatcccacagcccctatgtttggggattaagacagaaatttatttaaattttgactgacacgtgggctggttgatcatcaaatcaaacagactgcaagcaactttaattataattgttgacaggctagagttgaccatgccaggaactttcccattagtacatacatttcctgatttggcatcccccaccaccagcccaaaaacatgtcccacagttaacttttacagaacagtcaatgcacaccccaagtaccctagagctaccaaggtctttgatccccatcacccaccattagcacaggaccatctaatgaccaccaagagttcaaggtgttcactctgaaatctcgtcccacagatgaccctgctagacataaagccccagggtcaggggcagtaataagatggcagaaaaggcaactacccacttaatcaatgctttcttcggcaccagtacgtcctcaggatagttctctttcagagatcaatccaacctgatcccaggaaaaagaaatccaaccccatcagagcacaaaacagtgcaacagtggtttctgaaaatgccatcacctcccagtgctctccctccagcccacccataagacttttggttatccttgcttacccaggagaagctgcctacatagacagctgctcgtctactccgcaggccactgtatgtatacaggattgcaggggtcttgttgtttggtttgggagacggctcctggcgaacaggagggggcggttcagtgctactgcttctatcatctgaaggctgtgaggtagccgtcaacacatcatcatacaggtcaatctgatctgtattgttgaactccgagtcctaaaagatgagggattgacaatggagtcttcaaacttttcaatttgtttcctctgcttcattctagttgacttagaatcaatagttaaatgctttgtaaagaaatggacaagacctccctgtcccactctaggaaactgggtaagaaagaattcctgattagaaactcttagtattgcttataaaatttccaagactattagtagtatgcaagtttctgaccttagcctcctgtgaggatcagaaggcaaataatgaataagcaaacaaaccactaacaattagatacatgtgctactgtcaacaacaatatcagattcaaagacaacatctaaaatatattaataaaaatgtattttcaatatcaggctatccactattgttacatttaataagagtacatttattcagaaatataaagcatggggaaagaatgttaaagcaagtaggcaataaaatgcaaaacaaaacactgagttaccctttggtttatacaactgatcagggaaattttcaagctcatagaatacaatctcagcactcgggaggcagaggcaggccagcctggtctccagagcgagtgccaagataggctccaaagctacacagagaaaccctgtcccgaaaaaccaaaaaaagaatacaatctcaactttctaataaccatctaagaaacatcaaaaaaaaaccaaaaaacaaacaaacaaacaaaacacatggagtagaggattggggatatagctcagttgtacctgagtgcttgccttgcacaagaaggcactgggttcgagtcctagtatttacatgtcaaatatcaggtacaatgattttcccttatattttgaggtacaaattaagactgggtatagtacaaaaaaaacaaaagacaaaaaaaccaaaccaaagactgtatagtggcacatgtgactgtaatttcagtatttgggaggtagagacagagatcagcagttcacagccagcttcatacagagtttgagactagcacaggctgtaccagaccatcttaaaaaacaaataaataaataaaaggtcagtgagatgacttaatgcatgttcaattaccttgacccactcagtggaagaaaagttttgtcatcatactcatatacatatacaaaacaaatgtaaaaatgtacataaatcaccaaaatcccaaacaaacaaaaaacttcctcctcccaattagagcatcctgttcaatgctctaaccctcagaaatcattatacttggctctctatacctgtcagtttcccatctacagacttaaccagacaaatatcaactgaagacatcctaagtttttaaagatggggtagaagatatatagcttactgattaagaacattggccactcttccagagtacctgggtttgattcccagaacccactggcaactcacaactccagtcccagaggatcagacaccttcccctggccgatgaaggcaatgcatgtacatggggtacagacatgcataagcaaaacactcatatgcataaaaataaattaaaagaattaaaactatggggatggagtgcttgctagcaaaaggaaagtcctgtattcaacccttagcaaagccgaaataatcattgtcatcatctggagatgtttttaaagcatggggaaggaatgcataaagattttatatgcaaaaatacctcctccaagtggttctgaacatgctaggcaaggtctaccaatgaactgtatcttttgatatatttttttttaatttaaattttaaataacttcacagggtctggtgaagttattaagactggtcttgaacttgcctcagcttcctcagtagctggggttacaggcccacgcagttttttttttttttagatttaagtacccgaatattttattaaagaggaagacctgagaccaattccccaaagatattaaggacaactagactttatacaacccaccaaggttttttaaaggggaaagaaagatttttcaaatgaaacttaaaagacaataaggaaataactattttgtattcaatgccagaaaattaggaatccttttatgcagcatctgtgattcagagacgtatctaaaacttgtaagacaaagccatccctgaaaactggctagataaaaaaagtcagtgagccaatagaaagatttcaacttacagagcaaacattatcagtggaaaccttttcacactgttagcttaagggaatcaatgggctcttccataatctctgcaagaacaagataggctcaatcctggaggaccttgtttctatatattatcacttcagaaagaaaatccaataaatttaaatgttccaagtttcagtggtctaacagaggatgggaactgtttttaaaaagtgagctggacatggtggcgcatgccttctatcccagcactcaggaggcagagacaggaggatctcttgaatttgaggccagcctggtctaaagtgagttccaggacagcagggatacaaaaaaacctgacttaaaaaactgaaataaaaacccacccatcctacaagacaagttaaaaaaacacacccacatttcataggtggcaacactaaaatttttattataagtttaaattggaaatatgcattcaacattgaataaatatcttagtaagaattttgtgttcaaggacacacacacaaaaagctacagttatatcatgaatttcctaccaggagtttgatttttccctccaatatgctcagtgttcctcccttcttggtatctgagccagtgaagtaattaacttgggtatgtttttctcatagtcctcatcttacaactctcccccatcactgttgcccattactctgcattgttactatccattttgttattttacaacttttgttgttgggagaaggggggagaatggattctaacagtttcacattgtagccaagctggcctccaatttatagcaatactgccccagtctttagagcattggaattatagacgtgtatcaccacacctagttagtatcacttttacttttaaccattaggaatggcatcacttttcgagcacagagatttacactctcccaacaactcactacctctgatagtgtccagtaaacagaagtagttcaaatccttcctgatgtagaaccaagcatactataaagcccatctcagcatgagaatgaaaggaacaaacagaaaattcagcagagtagcagttctcaggcatctttttagtttttccctgtccagtagagcagttcgagtcccagggctcccaatgccacatcaataaagtatctccgcaaaaggtttttgcagtatatgctgccagagatcagaagcaaatacagggttccatgtagttaatgcactaattttcctttgggagcaaagtgcttgggggagttgtatgtagggctagcttggggcaaatcaattaactgtctaagacattaaaaaatccaacttatactgattgccttccatctaagccaattttgtcgtcgtcttttttttttttttttttttttttttttttttttttttttgagacagggtttctctgtgtagcttggaagcctgtcctggaacttgctctgtagactaggctggccttgaactcacagagatcggtctgcctttgcctcctgagtgctggcattaaaggcatacaccaccaccacctggctatctaagccaacttttagcaactctacccagactttttaaccaattagcagcttctagattacactaaaaccagcttcgccaaaaattaacttatggggatggggtctcctttcttaactttcagaacataagacactcaaaatctatactcgtttcaattttcccttttggtatatatgctcaaacactgcccttttggtatatatgctcaagagtccacaaactaattctggctttagagcagtaagtcgtcccccccccccaaagccaactaaggaacaaattactgaggttaataatgtctaccttgacaaagcagtgaccactggacaagaactatgtcttgtctatgattcccaagtcatattgcttaaccaattattaattaatttttcttttagatcaaatatggcccatggtacaaggattctgccacctgttctctaaagtaagttaggagcagtcaacaacacagattcagaattggggggtggggggaacacaccaccttttagtaatacagaactaagagacttgttaattaatgacaaagcataaatttcaaatggtgaaaatctaattcaaacaaacacgtaaaactcaggaaagccacactggagagggctcagcagtgaagaacactttctgcttgcttgcccagagaagcagagtttggttattagcacccatgtcaggcagctcacaaccacctgtaacaccatctccatggggaccccacactgctgggctccttgggcacctgcactcacatgcatagaaccacacacatatacaaaatggaaaataaaacaatggggcgcatgagcctcctttgtggcctcctatagaagtcaggttccaacccaggcattctacttttctagcccattcttcccaggtctttatgtgtacccactggaacacaccaatgacaagaaccagcttgcccaaggatgacttgctgaagaacccacgtaagatagttttaaatagaaagcttccgttaagctttgacttcaagatcacagtactcaactgcatagattactatttctacggacactgtataaatttcccagtactgtagtaaacatgcaaagacacaaacaaattcaacctagggtgactgagtctttgacttgcctttacttcccttccaccctccagaaatcgtaatgttttataaataaaacttataccaaaatgcccacagacttctcaagaccacagtcaagctatttaaaaagactaaagacacctggtatggcgctggaacctcatctttaaagtatactgtgtctttcaaagttatctcttgtactgtctgcaccattcagggggagggggcggaggggacagcaggaagagctaacattctgaagccgtaggctgagagaacagcaaagtaataagtatcaaaattatcctcacaatactgcaacaaatgtaattttgatttttaattatggctagtcattcaactttggaatggcttggggaaacaaattccgcaggctgattcaccattctattacacttgtctttttatttgctcttaaagcaagccctttaaaactgaagcctggaggttcaaattaacataaaggggaatggtcagtcgtcttcaacgcctccgctagggggaaatgcttcgatacggaggggaatgattttgagctgagagtctactgctagtagactgatgaaggaaaacccaaagctgctgccgcgtcctctcacctggttgaactcttcatcagcgtatatatcaatcaagtccactccttctgacatggctccggaaatacgctctcgagcccggagaacggacaaagtaagaaagatgacactacggtattcagaaaagggtaaaaaaaaaaattaaggcacgagggttccaggctgggaggagggcaatggtcgtcaatctctagtctcccgagaggcagcatcccggcagccagagcccggccccacccgctgctccaccccgcccccagcctcgcgccgcccccagctctcccaggccgcccgggctcgcggggctcgctgcccatcaccccgcgggcccgacccgagttgcgccgagtcggcgcccgtagctgcctgtggcacccccgccaagttcaggcctcgactctcgagagggccctcgggccgcgatgtgaagaaccatcgcggcggaggccgcaagctcagcccggcgcacctgctaggcccagggggcggcccaagccggagtcccccgcgggcccggaagctaccgccgtctccactccaaccgggcccggtcctcgccctcggctaggcctaccctgttccctcccacagctccagaaccacagcccctccctcagaggtccgcgcttccctccacccgccgtcttccgccgccacctcaaccgaccccctccccgccgcggcgccagccccggccctccttccggccccgccggcccccggccgcgcgcccccgttaccgggaatatggcggcggccgcggagagtcccgactaggcccgaagcgcgcgaaccgctctccgccccaggtcccgccccccccgccggcggcgtcacacgcaccgctacttccgccatacgctgggacgcgccttccggcttgaggtccagctccgctggagagagagggccacctccactcgtgaagtccgcagatagacctccgggagttcccggaagtggcccggttgccagcttccggtgccgtagggcgacatggcggtggtcaccttgatcccgacgctggcgcgggtgagagagccgaagatgtcgggttcggggcgggcagcagctaggacacttccgtcctcctcggtgtcgtggagactgttcagttaccccccagcccagggaaagagcccctcaaggcgaggcgcgtacaggctctggacacctcattctttgctgagcccatggtgtgctcgagtgagaatacttggtaatatgtggctaagtggtcagtcatcgtgcgagacaactcagatcttccttaagtccccaggcacagttaccgaaccgcctccaaaagcccacttctagctcctatacttaaagtcttcagtgccttctcccccctttaactggtcttaatgtgctgtccaggctggcctcaaatttacaattctcctgcctcatcctctcaagtactggaattataggtttgaaccaacacacttagtttatttatttattttgcgtagccatttgccgctataaacttgcatcttggtactattttggtccctctctcttcacttttttttttttttttttttggtatggtaggctttaatctgcctcgagattaaaaaaacaaaaatcgttcttcattactgtaacattttggttgttcaactgtggttttaaatatctgcatgtttgtgaattttccagttttgatatgctgttggtttccggttttatttctgtgttgttgaaaggtcgttgttacgatttatgtgacataacttgtgagctcttgagaatgttcgttcatgcatttgagaggaatgtatggtccgttgtgtggaatgtttgtgtatctcacttagacaaacttagcttagtgttgtagttgtctagtattgaaacccccaacccagtcctgtatattgcaagtgtggcattgaaatctgttgcttttacttccccctcccttcagttctcagtgtctgtttcatatatttgagttctctaataataggtctacatttagttatgattgttaataccttcctgctaactcttcttaatactttataatgttcgttgttttgttttttgttttacgccccaacccaggaccttggcatgttagggaatctcattttcttctttttgttttaagatttaaaaaatgtgtgcatatgtgcatgtgctttcatgagtttaatgtgtatgtgtattggtgcccatgaaggccagaagagggtattggattttctggaattggagttacaggtgggtatgagccacctgctgtgggtgttgagaactgaaccccagtcctatttaagaacagtaaatgctcttaacttctgagctgtctctagccccagcaatctcatttcttttgagtctctttacaggaattttccttgtggtattttaaattgataatttttactcattgtgttcagggtatggatgccatagagtgtatttttttgttttgaagattttttattggtcttatttatttatttatttgaattagaaacaagattgttttacatgtcaatcccagttcccactccctcccctcctcccctaccaccgcccaaaaacagaacgaagatttttttaagagagagagagagtgtgtgtgtgtgtgtgtgtgtgtgtgtgtgtgtgtgtgtgtgtactcacacacacttgtgagtatagctgtcctttgaaactgaagagggtgttggatcccctggagctgaagttatatgtggggagggagtgaccttgtatatctggttaatactagagtcttcctgacgactttgagttgtttatttcctgagcttaagaagcatctctgtaggatgggatatattcccttcctttagcacattctgtgtcttggctgggtgtggtagcataaggcagaggctggagggtcttttgagttcaagactagcctgatctagttgtcaagttccaggccagctagggcaacataatgaataacaacaacaacaacaacaacagcatcctgtgtcttaatgagtttccctccaaaattgaaggttttatcctgtaggaaattgctacacaatacctgtcatcattcatggaagccctgggcttgatctctagtgtcacatataacagagtgtagtggcatgtgcgtataattttagcactctgaagttgctggtaggaggatgagaaatctaaggtcatcatccttggttctttagcaagttcaaggccagcctggtgtgcctctttgatgagatgggaggtagagacaagaaaatctctggaagctcacaggccagctggactggcacacacagtagagaaaacaaagaaactgtctcaaaacaaggtggactgacacctgagctgtttctctgatgtctacacatacacccatgtttacaaacataaagattttgaatgcattttcttttttaaaaaaacatgtgagtactctatatggatgtacagctttatgccagaagagggcatcagatcccactatagttggttgtgagtggttgttgggaattaaattcagcacctctggaagagcatccagtgctcttgaccgctgagccatctctccagcccctaaatgcattttcaagtgccttttcccagagatgctggttcagaatgcttaggctgtggcttaggaaactgagctttcacagcatgcttgctgtattcatttacaggagctgccttacaacagaaatttctgttttcttctcttttctttttttttttttaagatttattatatatacagtgttctgtctgcacaccagaagatcgcattagatctcattatagatggttgtgagtcaccatgtggttgctgggaattgaactcaggacctctggaagagcagtcaatactcttaacctctgagccatctctccagcctaaatttctgttttcaaagttctggagactgggatgaagatggtatcatagttattttctctcatggtcttactccatggctttcagatagccacttttccattgtgccttcacatggtccttctttttacatgtacatttctgacttgctgggcaattgatgccttggtgtggacttcctcaggttcatgatactgaggtctcttgagcatctcaaatctgaatggccatttctttttccaaattttggaagtttcagtcattctttcttttctttttttctttaaagatggtgtgtgtgtgtgtgtgtgtgtgtgtgtgtctgtctgtctgtctgtctgtctgtctgtgtctgtgtgtgtttcttctctgtttatgtgttctggggatagagctcaggtcctcaagcacctttaccttcctctatcattcataatcagtagctttccctagtgtctgtgatgctatagtttcattgtaaccactgtaagttgttcagagtccccttcctcctcctttgcctccttgttttgtttggtactgtagcccttcagcttcatagtagccctgctctagcctctcaagtgctgggattacaggcaccatgccctagctagttactctgctctcttattctctgtgctgcaggacttctagagtatgctggctgtattagtgttacaagttgttcaaatagaaaccaacctgtcccttaggcaatgccaaccccatgctccagaacattaaccatgcactattccctgagccctgggaaagaggctcccaaacgatattagatttttgtctgctgtgtgaggtttcctctgtacaaaagtaagcctctcagctctcttggtcctcgtggtccttaagtatctgaaatgggttgggtcctgatgttgctctgaggcaagagagacaaaaaccagcccccataggcagcccctgagatgctagagcattagatggacaccccaactctatttccccagggaaaactgggagttatggattttttcttttcattttgcagtaaggcaggaatggggaccatggcaaatgaatgatgctgatgctaaccatcacttttgtttgctacagctttcacccaggtgacctttcctatagcacttgtttggatgaccttctaggagtcttacctttccctcccaggtagaagcctggtgccggaatattctccccatcatcttgtgcttgggtgatagttgtggggtgggagtgggatggggtggggaggggaggggttggggaaagcaggattgtggcatgtgcagtccacagccttcctgtaggcagctggttttgtactcatctggtgagcaagatcctgttttcccaacttctcacagaggaaatagatctgtgaattgttgagtcagtatctccactggaagggtttggtggcaaggaggatgtgggtcttcttattaaaaattgtgtatgtgtgtgatatatgtttgtttgtatgtgagagaggcaggggaggggagtgcttgcctatccttgtgtgaccagaagtgaccagaagtcaactttagggatctcctgtattttcactttatttcctgaaacaggatctctctattttgcctagactccctgaccagtgagcctctaggatccacctgtgctggggttacagatgagggtgtcattcctggccatgcttgactcttatgtagttatgcactcaggtcctcatgcttgcatagccagtgctttacttattgaggtatcatccagcccttctcattatatcttagagtttatgcccttcttaggtttggagtttttaggagatctaggtatcctccgggtttaataggtgagtaactggaacacaactatattgtatagttttaaaggaatgcaaaaggagacatgtttctgctggggtaatttctggaaaaattggttaacattacatctggaatactcattctgtcttgtagaatgaggtgttactcaatttatgaacatgtgtttgtggttctatttcagtgactatcccctctaaaccttagattcattggtttccatttcctttactataaagggaccagaatcagcagaaggactgagtgagatctaatgctgcttatgtgttgaataaatagcagtgatagtaatcattgtcttataaagacgtttgtggtttgtttgtttcaggtactgtcaaagcacagcctgctgtctcctttgttcagtgtgacatctttcagacgattctacagaggtgacagcccaacagattctcaaaaagacatgattgaaatccccttgcctccatggcaggagagaactgatgaatctatagaaaccaaaagagcacgcctactctatgagagcagaaagagggggatgctggagaactgccttctcctaaggtagtggggaagaaggctctgggtgttacttctctttgacaaggcagtcttgtcaacttcattttccttttaatttttagcctctttgctaaagaatatctgcacagcatgacagagaagcagctgaacctctacgatcgcctgattaatgagcctagcaatgactgggatatttactactgggccacaggtattccatatgataagctgcattttgtgatgataggataacaagcctatttgtgtctgaaatagtatcttagcaatcttttttcttttttgagatagaatctttctgtgtagtcctgagtgtactagaactctctatgtagaccaggctagctttgaactcacagagatctgcctgcctctgccccctgagtgctgggattaaaggcatgcgcctctaagtcaggccctgttttcatcatttttatttatatggtagacaccaaacctaaacactgttcacattgttccagagtgtgcaaaatttgcttaatcagtttctttaaaattttttttgacatttatttattttgtgtgcatgtgtgagtgtgcatacatgtgcacatgtattgagatcagaggacaacttaattttctcctttcaccccgtgggtttcagggattgaagtaaagtcatcaggctttgtggcaagtgcttttcctgccctctgtctagtttttttttttttttttttgtgagacagatggaatatagtctgacttaggtgaaaagggaatgtagtaaagcatgtgaaactcttagggtcagagggaaggctgaagaataggttgagaacagggtgaaatgtgctgggctacttcctacaggacaagccagtttagttgagagataaaggcggcaatatttttgggtggttttgtcgtttgagaaaggatcttgctgtgtagcccaggctggcctggaactttctatctagaccgagctggccttgaattcacagagatctgcctgcttctgccccgtcagtgttgggattaatggccagacacttgctttgttttgagacatacagtgactcactgtgtggcccagattgtctttgaattcatgatccttccatcccagccttcttagggctgagtttacagagtgttgggaatacagacatgtgccaccatcccttgtcagaatgatgactttttattctaaaagtcagcttaatgtaaagatggagggctcttgtccaagcccaccttagtcctggggggtcagtgagggcttggaaaagggaaggtttaagcaagtaggaatagaggctacaataaatcaagcttttttgaattgcaggccacaggcataatgagaattggctttctcagggtaatgctttctgaactttctgagttttctatgattaaacagtttcatgttagtgtaatggccatcttatgctatatattaacagactgcctgctcataacttcctgtaactccagctccaggggatcaaaagcctctgccttttatgggcatgtacactcatgttcattcttatttttttttttaagatttttatttatttattatgtatacaacattctgcttccatgtatatctgcacatcagaagagggcaccagatctcataacggatggttgtgagccaccatgtggttgctgggaattgaactcaggacctctggaagagcagtcggtgctcttaacctctgagccatctctccagccccctcattcttacacgattacaattaaagacaaagtagatactttgcttatttgaaaatccagcaaatcttaaatatttactatctggttctgtgtagaacaattttgatgctggcttaacataacaaatttcttttgtttgttgagtaatattccattgtgaggattatactacagtttatttattgaccagtagagggatttcagtgttttcagttgtaggcaattatgaccaaagccaccataaacatttgtgcacatattttgtgaaagtagatttcaggttttcttggataaatacccagaagaatcattggattgtgactgtgtttacctttataccacactttatccatacgggccagacagtaaatattttaggtactgcaagccatatagtctcacataactctataactgtgtctgtagcatgtgatcaaccacaggtagtaggtctacaaatgagtgtgcctgtgtctcaatagaatgttacttatggacattggatttgaacttcatatactttccaatcatgaagtattatccttttgagttttccccctcaaatttttaaaaattgggaggcagaggcagttgatctctgagtttgaggccagccaaggctacataatgagaccctatctcaaaacaaaaaataaaagtcattctttgcatgtgagtcattacaaaaataggcagctggtcatagtttccactgcttatgctaaaattcaggagtacctcctgtgtgcttacatttttatgatattctgagaaaggcagaacagagacaatagataccggtgattgccaaggacaaattatgaaggaacacttggcatcttatggtttctattgctgtgaagagacaccatgaccacaacaactcttataaatgacaacatttagttggggtgactgacttacagtttcacaggttcagtccattatcgccatggaagggaacataatggcatgcaggcagacatggtgctggggaagtagctgagaattgtatgtcttacaggcaacaggaagtcagctgagacactgggtggtatcctgagcataggaaacctcaaagcctgctcctaagtgatgcatttcttccaacaaggccatacccattccaacaaagccacacctcctaatagtgcccctccctatgagtggtaattacattcaaattaccacattccactccctgacccctataagcttgtaacaatatcataacacaaaatacatttagttcaacttcaaaagtctctatagtatatcacaggctcaatagtgtttaaaagttcaaagtctcttctgaaatttatgcagtcttataactgtaattccctataaaatcaaaataaaaaaaacagatcacatacttctaacatataatggcacagaatatatattaccattccaaaacatagggaagggatcatagtgaagaaatactgaaccaaagcaagaccgaaaaccagctgggcaactccaaactctgtatctccatgtccgatgtcaaaacactcttcagatttccaactctattcaactttgttgactgcaacacacttctttctcttgggctgtgttgctctgtagaccagactggcctcaaactcagagatctgacagcctccgcctttccagtatgtgcctcatcacacccaactctaaacttgtttttaattcctttcacaagttggaaacttagctgggtaggatcttaccctgaggtcaccactcactccctttattccatttcttaatccatttatctccttgaacacagaatttagctctattccactttctggtgctccttttctcctcaaatattttcccttgctcagcttgctccttttcatcataaatctttatcagagttaacactaataaccacacaacagtctacaccaggctgttctgagatttcctctgccaacagaattaattcaaactcttcactttagcctcagacagactcttcagacaagggaaaaaagcagccactttcttcaccaaagtatcacaagaccagtctccaggccacatactaacattcttctcctctgaaacctcttgaaccccacagtttatcaaatcacattcagcatcaccgtcttccatgctgttactagtatgacctattaagtagcacttaaagcattcattccactgctttcctaacccaaagtaccaaagcccagatattcccaaacaagaacatggtcaggtctgtcatagcagtaccccatttttggtaccaacttctgtgttagggtttttatttctgtgaagacacaccatgaccatggcaattcttagaaatgaagaaaattaattaggatgcctcacttaagtttcagaggtttagtccattatcatcatggtggggagcatggcattgtgcacgcagacacggtgctagagaagcagcaagcagcaggaagtcaactgggatactgggcagtatcctgagcataggatacttcaaagtctaccaccacagtgacacattttcttcaacagtgccacacccactccaacaaagccacacctcctaatagtgccactccctatgagcttatagggcccttgcattcaaactaccatacttggtattgtcaacatggcagccatgttggtgacatttcatgggtatagcttttgacattgctaggagacataatctaatagcaatggctcttgcagtctttctgccccttcttccacaatgatccctgaattttaggtgcaggcattgtgttgtagttggcactgggctccacaacttcattttgatcagttgttttctgttatggtttctgtctgttgcaaagaaaaatttacttggtggagggtgagaacaactgtttctgtgggcataaggacagatatttagaatatagttaggattatgctagtttattgaagtggcacttaaaggttctcctccaagatctgatttcactacccctgggtaattggctaggtttctagtaccttctagtacccagcatggtttccttctctttgagcaggtcttaactccaattagaggttcagtccattatcatcatgatgggacatggcgatgtgtaggtagattggtgctggaaaagagtcctacatcttgcaggcaacaggaagtggtctgtctcagtgggcatgtcttgagcatatgtgagacctcaaagcccacctccacagtgacatacgtcctccaacaagaccacacctgctccacaaggccacacctcctaatagtgccactctctttggaggctgtcttctttcaaaacacctcaggtaccttcatttcttttctttggtgaagtgactctcccacccaagtttattaatataagttatttgactttcaaatcctgtaccagccttatatccccaaattaacactggatagtcttgatttattaatagtgcaagatctttcctctccatgaatattggtgtataatatttcataagttgtcatctggttttgatcagataggttgtgaagtgcccttttccattttctggagaatatatgcagaattggtgttacttcttccataaatatgtgataaaatttgctactgtgccaccacagcctggcctctggctaattagtgtgacaaactttgcactctgatcttcaggcaagctttatttgttagatcgtaaatagaatagtaccacacacaattactaagaataaataataagccaggcgtggtggcacacacctctaatcacagcacttgggaggcagaagcaggtagatctctgtgagtttgaggccagcctggtctacatagcgagtccctcgatagccagatctacgtagtaagacctcaccctccccacttgacacacttgaaaataggtatcttttatatctgttattggtaatttgtattttatctcccctcccctttgttttggtcaatattgccaaagttgccattgatttcatttttttccttcacggggcttgtctttttatatcattggtattttctgttggttccagttttcagtccattggtttctgttgttgctcgtgttcttcttgtcttaagtgtgattggcatttcccagtttgtttgaagtagaagctaagcttatcagagatcttcttttccaccataaacattcagtcccttaagccagtgcttctcaaacttcttaatgctgtgaccctttaatacagttcctcatgttgtgctgacccccaaccaaatttctttcatgatcattcagcccatgaattattccaaagtatgtttaagtttcaggtatttgggaatttgccaaaatttgttgacatttgctttcgggcctgaaatacaagtactttggtaaatattccatatacactcgaatgtgtgtattttgttcttgtggacagagcattctataaatgacaactaggacagggaggctgatgatgtgttctccgtggttttcattttctgagtgcctgttctgtcagttgctgatacttttacttgcattgaggtgtctgttagtatagacactctagcttttttttttttttttttttttaagcatttatttgtatgtgtatggaggaggagcagctgataccacagtgtacatgtggaggtcagaggacaacttgtaggagttgattcgctgcttccacttgtaggttccagggattgaactaaggtcctaggatttggtggcaagcgccttgatcaactaagccagcttgctgggctttcatatttcttttgtttagtttttgcctagtgagtaactccctgtttgaagtttttccctcttgctttgtaaacagttaccacaagtttactaaacttgaagccacatatatttcttggatcatagttctgtgggtcaaaagccccgcccagatctcacactctaaaatcagtgaggctgtgtttcacctggagactctggggaagaatctaattctaagctcattgacatttttttttctcctgagaatttgtttccttactttggagggctgagttccctattgacctgccagcattcagtttcctttgcctttttgagggcctcgttccaaagccctctgcctgagcagtggtaaccattcctcatacttcccagttatctgactacccttccataccagctggagtaattgtattctaaaatcacagactctctctgtctttatatctaaatccagtttttctgtagacagaagtctttcttttttatccaatctgatggtctctgcctttcactagtgggtttagacctttcatatttactaaattctcaatgtgtttgaattaaatgctaccatctttggttgttcgttgtttcttccatctgttctttatcttttatttgttttgggggtggttgtcgccactattggattatttatgtccttctaggtttttaacaattgctcctgggttcacagtgtacagctttaattagtcatagtctgattttgagacctgtgagctgcatgtataatgtatggcctgtatagcagagtgtgcctctgcacctctcaccctgctgcccaaagcttttgtgctgtggtcattctttttactttgaccttcattctaagcctggaacacatttctcctgttttactttgggcaagaaaggaaaataattcaaaatacatgttctgctctcattaattttggccatttctggagatggttgtttctttatataaatctctgttcctatcccgccacaatccctctgctgaacatcctttttttattacttgtagtacaaattggctgctttgaattccctgccttgggtgtgaaactgaaggctcacagatttgtttgcttttcagcactgcagggagcgaccctgattacaggtactgctgaccatgcccacttgggcgtggccacagttacataacaggggtttaagaagcagggaggcgagcaggaggctctttcccccctggaagcattttctgggtctgtcctgctcaagtgcaaacctggtcactgattcccttgtgtgagtattttcccctaataaactaccgattattaagattattaacctgtctctgactacaccttgtattcgtctatacagcactttatgaagacttacttcttttgccaggctgtcagtatgtgactctagttccaggggttctggcacccacttctggcctctgtgggtaccaggcacacatatggtacacatacacatacatatacacagaggcatagcactcacacacataaaataaaaagatatttttaaattattctttaagagatgagctcttttcgtgctgcccaggctggccccaaactcccgagcctccagtaaacctcatgcttctgcctcctgagtagctggaaaaggtttgtttggctcacagttttatggcgttcagtccctgggtgatggaccccagtgctggaagacctgcagtatgtaggtgaggcagcacacgtcagcagcaagtgcctggtaaactgtattcatttggtggtcaggaagcatgtgtcaggtgtgttggaaggtagggaagggagggactggatcttgttatttcctttgagagtgatccccaatgactggaagacttcctaggacccccaaggtttccactacctcccaatagcaccaagcagggacacacaagggacatcgtccttggaggaacatttcccatcctgtgtttaggtaggtaggggtgtgtgtgtgtgtgtgtgtgtgtgtgtgtgtgtgtgtgtgtgtgtgtgtgttggatatttactgtgtttggagttctctgacacgttgaatctgggtttttatgtctttgattattattggaagattcttcagtctccttcatgttctcttccttttgcaattctgattgcaccttgaacaacttgtgtccacagttcttggcatctgttctatgtgcgtctctttgtgaatcagtttgggtcctttgtatttggcagcatctcatggcctctttttcactgattctttcttaattgtgtcagatgtcacgatgagtctcttgaagtcatttttcattgctgctgctgtgattttatttttagcatttccacatgacatttagactttctccctgctggaattcctcatctattcttatactttgcctgccttttccactggagcttttgatgttaatcacaattactttaaattctttttgctttctttctttttttttctttaaagatttatatattatgtatatagtgttctacctgcatgtatccctgcaggccagaagagggcaccagatcttatttcagatggctgtgagccatcatgtggttgctggaaattgaactcaagacctctgggagagcagccagtgctcttaacctctgagccatctctccagcccctattttaaattcttactgggagtcctgacacaagttatccctgagtctgttcctattgcttgctttcttgtagtttccctcttctgaatttattttatttttcatcatgtgtatgtatgtgtgtctgtatgccccatgagagtgcaggtgtgtcagtggaggctaaaggcattgggtctctggagcaggagtacaagtggttgtgagccacctgacctagggactggaatcaaattaggatctctgagccatctctccagcccctgcatcacattcttgtttgagagagattgtgtgtgtgcatgtgttacagtatacatgtggaggtcagagtgtaaaggtagttctcttttaccttgacatgggtttcaggaatggaattcaatcatggcaaacagccttgtttagtttgctaggtacttccaggaagaggagtattgggattacatatgtgcgctttcatgcttggctttatatgagtcctggacattttaacacgggctctcatacttcgatgccaagtgctttactcactgggccatttcctgagccctgtgttagctttttgagatggattctcattgccatcataggctggcttcaaatcctttttgtttttgccttttgagacagggtctcactgtgtagtcctggctgtcttggaactcacagagatctgctcacctctgcttccagtactgggattaaaggcaagctccacctcacctggcttcggttttaaattcttgattcttctgtctcagttttgccagtagtaggattataggtatgtgccaacatacccatgtctaacccatgttaggtaccttagttagacattggagatcaagatacgtagtgtctatgtgttgaggagccatgcatcatctaggctgttagtgtagggaatcaagttcatgagcctggctgttaagctcagtctagattatgattttgctttgttcatgttcaggacctcagcagccccatataatggtgtgctcagggcagaaattgtttctaaataatgttatcagtgtttctatgtcattcctagccttcagccttcctgtatttctgggcctcagagggattctttctgcatgctctggccttcttcactgctagattcctgtgccttccacttagccttgctagttgaggggtgccagggataaccatctctcttttccgtgtccagccttggtctcaggcaactcctgtggctggggtaggattagaggtaggattgatcagtgatactgtcccaccctcaggcctacatgtctgtgtgtctttcttctttcttctttttctccgttgactcttcttccagcccatatgagagagacaagattgaattacccactctcagttacagacttacctgtgttccttccaagagcttcatgttctttggccacatggactgtgctctccttctggcttcccactctgaggccagactccatcagggcatgtctggtgtaggctttcaaggaagagcctgtgagtgagagtaccagctccacttgggtgtgtgggcccagacatttaggctaacccacactaggctttgggaatatgtagctgatttttttttttttttaattttgtttggatagcctggaactcactggaacagactatcctctaactcatagagatcagcctgcttctgcctcctgagtgctgggattaaaggcttgtgccaccaagtgtaaggagaactcctacagagctgcagccggtttgattttggaatgttgggcctagccttaatctgccctttgtcttgagcaccttctgtttgaaatatgtaaatcctgcctgagtgttcaccaaaggtgcaaagcctatgcaaaacttggttgtgaaaaatccagcaaacaaaccttaatcaagaatttgcatttggcattgttcctttgagagactcagataagatgttttgggatatggaaatgaatttgttaaaggtgtaaattggataacaaaagaaaagccctggactaagggagagtgtctcagtccacactgagaggctgagtctgcctgtagctagaaagcctggattcatcctgtgtcttcttcctcagacccacatgaacccacacccattctacaacaaccgtgcctagctgatgaattcctccctgtttgtattacacccagtggctcctcctctcacagcccagcaagtgttcatgtacaattacctgtttgatgggtttctcttacttaatccttatactttgctgcactgtgacctcagccctgacaatgttaagaaaagtcctatttgttgtcaggctttttcttaatgttaaaagtgcatgtggtatccattccaactctctgtgctctaaagggaggcctaaaactcctggattttattttgactgtcacacaaaacttataacaagccagggctatttctcctgcatggtttagcaggtaaaaatggttacctcacaagcctaggacatggattggatccctgaaactcatgtaaaaagctcacaaagtagaacatgctttttattgttttgatattacttgtttattatatatctatggctggcctggcatttactgtgtagaccacgctggccctgaactcattagaaatccacatgtttttatgctagaattacaggctcacaccaccacatccaagtggtacatatctgtaatgccagcactcttacagcaaatcctctggaggctggtaggccagccagcctggaatatccagcatagaaacaaggtaggaggagagaatcgacctccatggccataaggtagcatacctgtgccttacccccacacacgcatgtgcacacatgcatgcacattttaaaataaaatggggtggggagatggcttcacaattaagagcacttgctattcttgcagaaaacccaggtttggttaaagcgttcacatgagtactcacaaatggctataattccaaatcctggagatctgatgccttcttttggcctttgcaggcactagtcatgcatatagttcacatatatacctgcaggcaaaatactcatacacaaaaaataaatattaagaataggagggctggaaatggagttcaatggcaaaaacacttacaaagcatatatgaggccccacctgggttcagtctccagcaccacaaaacaaaaagaataaaagtggaaacactactatagtctccctttatttgtagagaattcattataaaatcctcagaggattcctaaaactggatgatcttaagccctgtatagcccatgcttaccccatataccctgcagtgttacctgtcacacagtaccagaattaacctgtctgtccatttctatgccccagtgccctctttgtatcactactcttgtgctttgggtctgttactaaatttaaaaatatggtttcatagctagacatagtggttcatgcctttaatcccagtactcaggaggcagaggcaggtggatctctgagtgcaagactagccgagtctacatagtgggttccaggaaagatagagaccctgtctcaaaaacaaacaaacaaaaaacaaagaatgtggtcacttgaacataagcctgcaatagtgcaacatttatttatattctcaaaactaaggtgtctaagtgactaatgcatgggtagcgtatacagtgtggatatatagggcaaaggataattcatacacaaggtggacagagcaggatagtataagattttgtcagcctattaagaatagcatacagaggctggagggatggctcagccattaagagcactgactcttcttccagaggtcctgagttcaattcccagcaaccacatggtggctcacaaccaccttgaatgagatctggtgtcctctgctggcatgcaggcagaagactgtatacataatagataaataaaatctttcaaaaaaaaaaaaaaaaggcatgcatcactgcctggcctagtcccccctttttaaaaaaaaaaaaaagaatagcatacaggttaaaactcacaaattatttctgggattttgtgttgggacctgttgacctgctgcatgtgtgtgaaaaggggagtgagacaaaaagaaagagacaaaagacagaagagaggcgggagggctctcagtgatcactgcagcagccccacatttatttctcacagccctttatacccaaagcaaaaggggcggacataagacttcctaaccatgatacgaggaacaatcaaatgtaatcatcccgttaattctcaaaccatgtagtaaccacacctttagtcaaacatcctgttatttggtcttgaggagcaaaacatttagtagtcatgcctttgaccaaacattctgttattggccttgatgaacaaaaataagtttgaactctctgatcttacatcaagatgaaatggagtcataactgctggctctcacaattttgtactttatattgtcaaactgtagaagaaccaaggtaagtgatactgtggatgttgaaaccaaaggtaagggggaaataactctgtgcccagaagacaactgaggccaaatgcaaagcaaaacagtatagccaaaattgcacaaatgaagggtcatcagatttgttccttaactatcactaaatattttagtcatgaggctgtatgagctttgttgtcatccctcaggtctaccattgtaatacaaagtagcctggaccatacgcaagcatatgaaagaagctgtattaacaaaactatttacaaatataggccaacacagtttaccaacccttgtatagcctagagtatttggaggaagaatggtgatgacccatggtccatttattcatctgtggttcttggctcttgccagagtttcaacttgctctttgttgttgtttgcttttagattttaaaaagaaatgtactttttctttaaaaattatttttatggtgtgtgtgtgtgtatgtaagaggtcaggataacttgtgggatttggttctttccttctaccatgtgggatccggggattgaactcaggttggtgtcaagtgtctacttattgagcctttgagctggcccttaaattttactttttatttttattgatgtgtgggtgcctatggttggccagaagaggccatgggatctcttggagttggagtcacaggtaatggtaagcagcctgatatggatgtttgggaagttgaagtctggtccacttgaagagcagcaagcacttgtaccatgagccatctcttggcttctgtttttgtttctggagatagggttttactctagcccgagctagcctggagctcactctgtgacccagcttgatcttgaacttgcagtaatcatcctgctttagcctgtaagtgctgggtctctacaggcagcttcatagctccaagtctttcacatgagcattgacatggtacaattctttctgccttctgttgcagaagcaaaaccagccccagaaatatttgaaaatgaagtcatggaactgctgagagagttcaccaaaaacaaaaacaaagaacagagactgcgtgccccagatctggaatatctctttgaaaagcctcgttaagccgtgtgccactgcctgtcatggtggtcagtatatggacagaaactgcttctgatactgattttggcttcctactttcccttaggcacttgagcctctaccaggactatgcaagatgactcattctaacctgcacttgtctgtacagcacagatctgccacaagagggcgctgtaggggaagcagttccgcttgctgcctcagccctgacagtacaaaagacagctgctataggaagagctgctcacctaatcctacaccctgtggccctgggctttgttaagataaaactgccctcttccaacttggtatagttctttctgccaaagagagctgatccaagctcctgagctgagtccatcaaaggcacagcaagttgagtgagggcaccaagcaggaatggtgtgggcacactgcttaagtcaacatcctcatcagattttcttcacaacatgccctttgtaaaccaaaagataactgtatactgaaggatatcaagggaaggaaattgacggttctctaacctttacaattgttcctgtgcagcccatagtcatacttataatggggttttacaaacttataatcatgggctttctgaccttgtggcactgtggcaaacttccctcctcattcctacagcctgtaaaattatttagttgaccaaataataatgacacataagaaataacatgttaactgggtgtcatgggtcatgcctgtaatccctgcccttggggtctgaggtaatagtatcactaggaatttgaagccagcctgagctataaagtgagtttgaggccagcctgaaccactctgttagaatgaagtagcttggagggctgtgcattgctgaaggtatgctgaaggtaatcctctctgtaggatctctgctcccagctgagaagaggtagtcagtcactctggctggtatgtgatggctagagggaagcaggccagaactgataacatgaggtcatgtagttaccaaactacaagagctgtaggcaaaaaggaagaaagagtttcctggccaggggaagaagtggggaaaccagccttcagttacctcacagcactcctacagaggggtgacattaggcctgtctgtagacaagagagttgccttagaaggagtcagtaatacatccatgatcaaaaagccaggatttggggctggacagatggctcagtagttaagagcgctggctgctcctccagggaactcaggcttagttctcagcacatacatggtggctcacaactgtctgtaactccaattccaaaggagccgatgccctcttctggtctctgtgcacacactccacagacatgcatacaggcaaaattcgtagaataaagtaaatatgggttggaaagatggctcagcagttgagcacaggctgctcttccaaaggacctgggttcaattcccagcactcataaggcagctcataactgtctgtaactccagtcccaggggatctgacaccctcacatgcattcagacaaaatgtcaatatgcacataaaaagaaataaatcataaagtttgatctagcttcctgctagacaacagggcttcactgctaacatttactaacaaccttcacttctggacattgtactgcaaaagagaaggcaagaaaagaaatgatagttcttagacatgaactctgtgttgcactgtggtgagtaggaggctaccagctacttcccaaatgaggaaattcactcactttgatcaccctgaacagctctggcaagggaggaagaagtatagcaccatggttgtgagttcaagctttcccttcattgcttagctgctgaataaactcactggcctaagctttggtttctaaccaaaggtgataatcacttcagtctcaagaaagctaggagctataatatgtaacactgggatggttcccagcacacaggataccataggaagacaggaacctttgcttgtagcctcaccctgagacttagagcctgtcttctaacagattgcctattatcaattgcatgcatacatgcagggcagtttcaactgaaagtcagaaggctgagcctattaaagtaaccacaaagtgccttgccagccagtgaaaactggaaagaaaaaaaaccttggtgacaagtcctttgatggaaaagtataggtctcacttaagcaagaaatgggaatgagacatatagagtagaagcaggaggttacagaaatgctggccctttgcttgagcttctgatgtccctcagggggagtgctaaacaggcagggtttatatatagaaacatctggactttaagaagtgcacaggaattgcagcaccttccctatttatcctgagcccattatacaacaagccccagaacccaagtatgcagtatgggctctccccacctcagctctgatcccttcttaccctcattttgctttatttcacatagtgttcagttgccgtcacttgcacttgagaatggcatgcttctaaaggaattgttttcctcccaggctgctggtttgtgtgatctttgaaagtgaaggatcttgctaacttcagccgctcagtgtcaagcccaagagtgcaatgtaaacagttttcccctttattaagcattaaggaaaactaggctagccacagtacattttcagaaaaattaataaacttagcacaggaccagcagctcccttggacccacaggaagcaccagctagactcattgttctcagcttgacatgttgctgctcactgacctcattctgagcctgtgtcaatacatgagcatctgatctgccctgagaggtctgcagtggccctgaatccccttgcacaggctcctccggacacatcaaactggatcaaggctgcttccttcccatcacttcctcacttcattgttttaaattgtacccagcctttccctgacaggtgagtgtctcttgtggctgccatcggagaggcgcctcttactgtcttggagcaccagctggaggtcatccagcctttttcttcagtccagccaaggtggcagtggtacaacctggcttttgtttttaagcatcactggggaagcagactcctctgagagaagttgagagcttcacatctgtccttcaggccatctgccacgttgaggctagacgggttggaaagctttgtaataagtaagcccaaagccaggtatggtggtactcacctgtatgcccagcatgcaggcaactgagatagattagcattaaaattaatttcaagctaaaagcctccgaattgtgtttgcatataaggctgttgtcttccactaaaggttaacctgggctacatggttaataacagcccaaccagggttatggaataaaatgatctcaaaaaacgaggtgaaaagaaacagaagaaggccctgaatgtcaacctgtggcctttacatacctgtagaggcacagtcgttcacacaagcgcatgtacatcagccccagtgagcacaaccatgcatacacaaaggtaagtcaaacagccttatatggtaagagggtcactgagactgggaagttgaaagtccttgttagtacagcccatcgttcgtaggatgctgaacttcttgccctgcaactattcaaatgccagccaaggcacccagtgacacttgagtttctcagcaagctctctggggttcagctgtgtacgcatcttcctttgtctagtgaagcagcatgggtaggatgggtaacttcagataggggcactgtggttttgagaagcgaacatctagccacacctggtgatacatatgggctagcctgggtgacagcaagatcctgcttccaaagatgaactttaaaaagcagtcaactgggagaaatgtagacatctaagctatgaaagacagtattagtcttgaaaagtggagttgcaaagagaattctgacccacaatgatgagaggtgttaaagccagggcccaggccgaacctgaatctagagattcctggccagtgtgagaatattgtctgtaaatttaagattggcacatcattttatgtaactaggcagcactgtgtaggtgggggtctcatgtagcccaggctagctggccttgagcttatgaccttaatggtcctcctgcctttgccacatgctgagactacagctgtgctaggagatggctcagttggtaaaggtacttttccaccaagccttagagcctgaggtcagtcaaagaactgactcctccaagtgtcctctgacctccacacacatgctgtagcactcacacacacagaatacaagtatgtgctaccatacccaatcatctatgggggctagagagatggcttaaaagttagcagtgactactgctcttgcagaggacttgagtttggttccttgctggcacccatgttgggcagattacagcttcctgtaacttcactccccagcctctctggctcccatgcaatccacactcatgtgcacacactccacacgactcataattaatataataaaatgtcaatcaagagaggtgtctcagtggttaacaacaattgctgttcttgtcccaagtttagttcccagtactcaacaggcagctcataaccacctgtagctctagctccagggcatctgacttcctcttctgatgtcagagagtatctgcacaagtgcacatgcacacacacattaaaaaaaattaagcttaaaaaaagtgcctattttaccctagaacacattcaggggaaagaacaaagagtaggtatttgggagtggggatcagggtatggctcaacggttaagcgcttgcctagtatgcctgagatcttggattcaatccctagccctgcaacaaatctgtacaactaaagcagcagtgcggctggagggatggctcagtgcttgagagcactgattctcttccagaggacccaggctcaattcccagcgtccacacagcagctcacaactatccataactccagttccaggggacccaacaccccacacagacatgcatgcaagcaaaaacacaaatgcacataaacaaatgactaaagcagctgtttggaactcagaatcctagagctgtcactgatcagtcagatgactctggccacagttcctctccagcttttgcttctcccctgtggatgcacctgaacctaacttaacctagtgcagggacaagaactaaaggaaggaatgcattcaaagtgctcagtgtggtacctggaaccctggtgacacaatagtaactacagtaaatggtttactctggccatgtgcccagattgccaagggttttatgtggatcttatcatttaatccttgtttatcatctgcctcccccatttcttggaaggaagtaaggcttggtagaatgggttgtttgctcagaatcacaggcagaaagcaatagaactagggtctaaaagaaggcaatggttgtaagggcttcatgtgtcagactacttcatggaatgagcccttttgttgatcttgccacagtctatggaaggctattgatcctgatgactcgactgcagctaccctctctccagtggctccctgcagaactgttagtcacttgtaaaataatgcctggcataaataactgaaaaggaggaaaaatttgttttgactcacagtttcaaaagttatggtccatggttggctgactctgatgctttgtgactgttgaagcagagcatcacagcagaaagatacggagggccaacattccccatctcacagtgtccaggcagtacagacagacagacagacagacagacagacatacagacggggcaagatgcatcttgggtatgtctccaggacctactttctccaactaggttccacctcttacttttcactaccttccaataatgccaccctgtgatgactccataaggaacgaggtcagagtcctcaggagccaggcacttcccaaaagcctatcagctggcaatgcagtccccagtatatgagtctgtgggggacatttcatattcaaactgtaatgagtaccctggggcattgattttcacagcgagatggtcacagccttagccactgcagacttaattacttaagccttccaagtaggacacacgaagccaggctctcttgctgacagtttgagctcagacttcctttgggcttagggaggggggagcaagaggaaaggattagaattctcaccctgctttgagcatttcctactcccctggtgcttacagggttgttctgtcactggctggctgtttccttagagtgtgggcgagggggatggctgagggttggatgagtgttatctggaagcacatagggacctcattccagggtccccagattgactttcactccatcacagttcctgctccaaggctgttgctgacaagccagcactggttcctcctgaggctggacaccctgaggctagtcctttttgagctggacccttgctccctgacccctgctgctcctggctcccatccctcagcagatcatgccatgggaggttttagtggatactggattagctagcgtgtctcctgtctaagtggaaacaggatgagtgatgctcagaaatctaattggaaagatatactgtaatggttttcactagccactggggatggaaaagaatgtgccctgtctttccttgaagcactcactgatgtcttctgtgctttatttcattgattgcggagcagtgtgctacacccagtaccagacacagacagatcaatgagatacagctcacaccccagggaccgctgaagaggaaggcatgggaggtcttgactgtgtgtctcagccactgacccccaaaggcagcagcaggagtgatagatctgtttctgcagtattgatgaggacaccaggccacgggatctttaaggccatgcatatgctaagctccttgttctgaaattcaactcaccaatcaggattgccagacagactcttaagcttggcagccttatcctttgttgtgtagctttgatgggatcagccatggtcctggcattagctacaggtttgtcagtgatcatcttgtggaagtcacttctcttccctccaccatttgggttctggggattgaatgccccaggctaataatagttgctgaagcaagcacctttacctactgaagttctcaattttttgaaggtagttacttaatatctccaattctaggcacttagtacatcaatctcaccaaacacaagcaatttttcctttgctatttgaacagcaagtgatgactaatgctattgactatttactccaaccagacattgggctagcagtgggggcactatgctgttcctcaggatagcttgctctgccattccactttcttatagccaaggagtaggatgacaaagggagattcccccacccacccagagagaagagctgggccagtgggaagactgaaaaacagagttcaggagcccaacagcagctggctttccacccaccttgagcaggtggccagagtggtctttggtggctgagtggttggacaaagagaagccacacaagctcgagcttgtcaccatagattctggactttgtgccccgagtgtgaagtaaaacttgatttggcaaacaaaagggttgacagtccagagatgaggactgtcatgaggtaccatttcccactttctggtttactctggtgtgtggggaacctctagacacacaggaaaccagagggagcctcagtaaggttggttctgtgttatcaggcaaaggaatgtggggaaaaggaacgaaagaccttggtcctcaggcccttcaacctgctattacactgctacttatttcccagagggcacttggtcagaacagtgggctacatgaagcaggagggtcacctatatctttcaaactgtgagtatgaaaaaaccaactttcccatggtaagccagaaatttggctcagtagtcggtttccttgtcattgcttgctgcagtctgacacatcttagaacagaaggctcatggtgtgtcaccagtgcaactggggacagtggactcatggtgtgtcactagctttccacctcattagaatagtgtcccttcccaagcacactgatctctcatctcagaccgagtggatcttaaacagctgttgacattgcttctggacagtaggagaaacctctgcccttggctttatggtctgacatttccttgggcttcctgctgcatctctagtcatacctttgtcgtctctctgagtcatttccaagtcatggaaaacgacgatctttgtgatgctaacctcttttctatggatactctttaatagtgacctcatccacaccagggtgtccttgaccacctgtctgtgaattattctgcttcaaaccatgctctgagttccagcatcagagctgactgctaatgtggtacctctactatgccttaaagactggacaggtccagggatccagcaacatagctctgtggtagagctcttacctattatgtacaaagctctgggttcaagactcagcaacaccccacccctcacctgggcagcatgggagaactggccctggtgatgtgggcacagaacagctggtaggctgaccaactcagctaccaccaaggctcagatttagggatttgattggcccaccccaacatctatcccaactatgagctactcgagtgtggaaaggggctggtcctgtagaaccatagcgcaggagctccatgactcagaacaacaggatatccaagaggaatctcagtgagggtccagcattgatggtgtagcagaagccagaggccttgaacaagaccaatgattcattgcaatgagcatttgcaaataaagctatttgggcaaaagggtatactgtataacataccacagcttccagtgccactacgaccaatgaatatgtgatggagaggcgggcgggatggaggagtggcagggtgtatgtccagcggaactggagatgcacatggctctgacaacagtgagacaagtctgcagttgatagaggagcaggtcatacccagaggagttgggaaaaaaaaattttttttgagacaagttttatgtgacagtcctggctttcctggaacttgttttgtagaccacagagatctgcctgcccctacctcctgagtgctgagattaaaggcatgtggcatgaccaactgttttttggttgctgttttttaaatttttcactttttaaaaaattttctttaggatgggtttacaagggtggggggctgatatggaaggaatggaaaatgagggagattggggtacatggtgtgaacttcgcaaagaatcaaacatgtgtaagaaaaaaaaaaaaaaaacaactcgggctggggagatggctcagctcttccagaaatcctgagttcagttcccagcaaccacatggtggctcacaaccatcaatagtagaatctgatgccctcttctgatataaaggcaaacatgtagatagaacattcatttacccagaataaataacatcttaaaatgaaaaaaaagacttggtgaaacacacacacacacacacacacacacacacacacacacacacacagcctcagctggatgcttcctcagctttcccagaaggcatgtccttggtctgtctccagaggccagaaggaaaggactgagttctgaggcctctctactgtactgtccttggattgtcttagttaatcaccagccagagccctgtgcacggaggtggaaaaagcaaaagactcaaaggatttctattggttggtctgacacgagtgtaagtttgtcaccaatgatcagtgtccagaatgccttgtttcagtgatgtgtgtgcggggatagtttccagaaaccacagggacctctgctacctaccaggccccatatgcagcattgctagaggctctggagctgggatactgggtcacatggcaagcctgttgcctggtcagtgtcaggaggacagtcaaacagcacctccttcccctaatttggttagccatcacctctggtagcctgagtctgagaccataatctgagaagcacttgccatgtgtgaagtgtgcagccaacatatctcaatcatatctcacacagaaaagcaggagcactcttaatcatgcccacctaagctgagaagcagaggtgatgtgatatgatgctgcttgtgcaccccccattctggtttgtctgtaaccctcctaaaacagtggaagctgtctccggtgcaccacactgctgtttggggtctactgcctgcattctgccaatgctcttcttgtccaaggctactgccccagcctcagtctctagtgggtgctccattgcacctcaagattagcctcttgatccttctagtagctgatagcacacaagatcccacttcttaaatacggcttcatctttccaaacaaaacacaaatgcagctggagaatcatctcttgtcacttcagggaccaccgtggagctctgtgcaggtagagacttttcaagtctgggctctggaaggggtgccccagcaaggagcgggattgcaggcagaggaaattgtgcaggcatcagcaagcacctagagaacaccgtatgtgtttggagagggctgcagtgttcgtggcagggcgagaacagagggcatccggtgggaaagcattcggttggggcttcaagagaggagagtggcaggtctttttggcatgctaaaactaccacacttaattataaagtaaaacaatggttctaggttttcaatatgatgaaacagccgagataatttataaatacaaaaaaaaaaagttgtttggttcaaggttttagaggttctggtctaggactgggcacacccattgctttggcagagcacccccgtgcctgtgtggaatactgcaggtcacagacagagatgtgttagtgggttcaggttgtgttttagtctgtcttctgctgtgttttagtccgtcacagaatgccactgactagatcaattaaaaacagaaggtgagccgggcattggtggcgcacacctttaatcccagcactcgggaggcagaggcaggtggatctctgtgagttggaggccagcctggtttccagagtgccaggacaggctccaaagtcacagagaaaccctgtctcgtaaaacaaaacaaaacaaaacaaaaaaagaaaaccaaaacaacaacaacaaaaaaccagaagttgatttagtttacagctccagagactgggaagtccagcgtatggtgccacctggtgatggcctttgtacaggtcatccagtggcagagggacaagtcagtacctgttagatagtaagggtgtctgctcagtggtcccctcttcctcatgtagagccactaatgttgccatcgtgggcccaacctgcctgacatcatctaactctaatcacatctttataccgtaaaacacacgaacgtgggctgccataatagagcaccaggctgttcccatcaggtcccacatttactctccatccttgaggggacccttgtacctccaggggacctcagatgggagtgacacagagtagctcctcccatagcaacagccaatccagctctaggcaggctgggagtgtagtgctgtcagtgtggcaggctgtgtgctcagcacttgaacactgccttttctggatcctccactccactctgaaccatctctccatgattccagcatacagaggaggaaacagatccctgggctctgcaggactcgccttctaacccccctctgagtgtctctcttgctgatggctttggagaatctcccttgctgtgtgagattgagactggctcctgctcactcttccatcttgctgcatcttctgagggagtcatacatttttaaatctcgtgcaagatcaacaaaagcccagaggagacagcaagagaacggaacaggcagagctagagcagccatcaaatcagtactgtagaatccttccaggaaatgttcatgggaggctaaaggagggaaacacagagtgatgctaggaatggggactggggagggccactatccatcctgggagtcagtgtctttgagaagggagctagggagagattgcatttaacatattagactcagggcatttcagttcccagtggtaatgccactccatgaacagagtccccaaagtgtgtgtgtgtgtgtgtgtgtgtgtttgtgtgtgtgtgtgtgtgtgtgtgttgcgtgcgtgtgtgtgtgtgtgtgtgtgtgtgtgtgtgtgtgtgtgcctgtgcaagtgcatttacatttgcatgtggaaatcagaggacagccttaactgttattgcttagaagctgtccaccgtgtttatttttttaaatcattgcctttatgtgtgtgtatgcatgtttgtgtgtgtacatgggtatgcatgtgtatgaaggccaggtatcttcctcagacactatccacctatgttttttagatggagtctctcactgaacctggaactcaccgattggctagattggcttgtcagtgagccccagcaatccatcctcctgtctctgccttctcggggctgggatttcaggcatgggctgcagtccccaacttttttgtgtgtctctgggagatcaagctcagatcctcatgcctgcatgacaacactgagttgttgccaccatcagccttgtattttgagatagggtgtcacactgccttgaaacttgcccagtaggctgggccagctgattagcgagctccacgaaagtgtcctcttatctcttccttccaagtgataggattatggtcaccacacctggctttcacgtgtgtgtgtgtgtgtgtgtgtgtgtgtgtgtgtgtgtgtgtgtgtgtgcatgcgcgattatgagcacactcatatgcaacatcctgcagggaagttctttaagcaggatggtaaaggactcaaaatagcttcaggaagtccctgaaactgacaagattcactgtgcctctgtctgccagctataaaagctgagcgtccctcttagagaagccaggctgcaaagaagactctccagaccagcttcctggaagaaaccagccaatcagcctgaaagaggcttagaccaatggaggcacctggaaaggacattcttcaactttttgagctgcctaccggctgtgcagtgagctccaggttcccagctttgtgagctgtcacccatgctggggtgggctttggtgatgcagttgtctttgagccatttctgctcctgtaagtaactcttcacccacacacctgtaagtaacctcaataaaactctctggttaatcaggttggactttgatggtagatgcctgtctggtacttttctttggtgaggtacctatctagggtgagtaggcgtatatgtcgtatctccccaggaaaggtttggttacacagcatcatcacatgtgttcatgttgcctgtggagggcagatggcatcagagtagagatgactgtgaacctccatgtgggtactgggaactgaacctgggtcctctgcaagagcaacatgtgctgagctatctctccagtcctcccctccttttagaaaatgtgagtttgccgggcggcacacgcctttaatttcagcactcatgaggcagagagaggcaggtggatctctgagggtttgaggccagcctgatctacaaaggaacacagagaaaccctgtttcaaaaaacaagcaagagagagagagagagaggaaggaaagagacagagaaagaaagaaagaaagaaagaaagaaagaaagaaagagtaagaaagaaagagggaaggagggaggagggagggagggagggagagagagagagagagagagagagggagagggttagagggagagagagagagagagagagagaagaaaaagtgggttctggggattgacctcaggtcccatgcttgcctggcaaacatgctgctgactggcctgccaccacagtctctcaaagcaagtttgaaaggttgttcctgtcccagcatctcaggctcactggtaccagtgcagagacactagagatggggccctgtccattagcatctccggacacgttatctgtctacccaagaagttgcatcacctgccactcccccatggtcatcttgccggcaccattcagacttcccttcactctctggttgtgtcatctctctttactccaacctaggaagcagccaccttccaatgtcatgactaggacaagcctccgtggccagtctgtgacagatctctgatgtaaaggcatgtccacgaagcccccaagttagggggctctttaaaatctttgttatttattttctttttgaattaaggtttcatgtagcctaagttggccttgaactcactatagcagaggatgacactgaacttctagggtccctcctgcttcaacctcctaggtgttgtgattgcatgtgtgcaacgctgtgtggtcgcatcaccagttttatacagtgctgggaatcgaacccagggcctcatgcatgctaggcaagcagtctaccaactgagctacatccacactccccatttcctgcttttgatgtttttcttttgtgaattgtttgctcagggcatttgaggaattggatgtgagagaccaccagagggatagatgagtatttttttttaaaggattaaggctagacagtgagggcatataattttaagatttatttgatgtgcattggtgtttcgcctgcacatatgtctgtgttagactgtcagatcccctggaactggagttacagacaattgtgagctgccatgtgggtgctgggaattgaactgggtcctctgcatgtgcagcaagtgctcttaaccactgaagcatctctccagaccagcataccattttaatcccatcatttgggaggcagaagcaggtgaatctccaagttagaagccagcccgatctacaaattgagctcaagacagctaagggtacacagagaaactctctcaaaaacaaacaaaaagggatttaaaaaccatgtcatccaaagtaaaaccatgtcttttgaaaagagctcagagaacctccaacacaatctatgaggcggttagctatcaaagtggttagcagcatggccttggaggaaggacaacctgcttcaaacagtagctgcttcctttacaggctgtgtgaccccagctaagtcaggcactctctctgtgcctcagttccttcatccatgaaatggaggagctgatcttttccacttgcatgcggtaagatgtgctaatgtgtgggagatgatcagaatggtgtctaatacccagcaaatcctgagtctgtctgctattattgtcagcctgcgacactgttgcttgaatgcccttattggacggtgcccttccattaagctggaaccttctggcctgtctcttcttgggagctctgcactccaagatcagctatcaagatgcaccaaccaaggtgaaaccatgcatgcttgatggtgtgacatcttacatgctccatttagccctcttatggggacctgcagcccagagcataaatatctgaactaattcaggtctaaaaaagaggaagatgttgtcctcctgcctgaggcgaccattacttagcaaaaccattaagttgaaccaagcggtgtcagagctcactcctgaggtcccagcactctgcagaggatttcccggcaggaagggaatggactcttgagttaaagctggatttggatctaagagccacctcttcccgcttgtgaaactgcagttggcctccccatttgtaaaacaggcttattaacaataattcccagctcttagggctggaccaaaacttgatgagatgccatggggagaggactgggagtgtaactcattggtaaagtgcttgcctggcatacacaaagccctgggttaaaacctcagcattgtataaattgagcataatagcccatgcctgtgatctcagcacttggggatggagacagcacgatcacaaatccaaggcctccagtggccacgtggcaagtagtcatgaagccctgtctcaaaagtaaagagccgggagatgtttcctaggtcggtgcccagcacagagatagtagttaatacatagtaatgagtatgggaagaatgtagggtgatgtgggcctttgaattttcaacctcgatggagaagattgtcagcttctccgtagaggtagaaaaacctaggtacacagagaggcccaagtcatacaatttggctacaaggaccttcatccatgtgggaaacccttagacttcagcccctcatgagatctaggcctgtccagtttgttctaaagcgtagatgtgtaggtaggggtgcgtaggttctagccatctgtccactccaaggagtcccagctctattaatgttctcacccacagttttgccctacagccactagacgtcgctgcataacaaaaaacaagatctgcagcctggggctgtcagccctaagcagctcaagatgcccaagagagctgtctagaactttccttccacctcttctccagccacacagaatccatctcagaacccaggctgaaggccacttcatgcttgccattaccttcctagtctgcctgtgagattgccagacatggttgtcaggtatttcacctcaccaaagaccttgtgagtcagatgtgtcctcttggcttacagatgcagaaacaggctcaaagaagtcctacagtggagagtttttgagctcagactgagagtagaacttactttcgccccaccatgtgagatcctatggaattctgtctttaactgtttgcttcaacccttttccctagaaagctgcctcagtaggtaaatcacttgcctcacaagcgtgagggcctgagttcagatccctagtccatgtattgttgtggaatagaataattgtttaactatgtaaaggtatgttacatttgtttaactatgtaaagatgtgttgttttaggtttttttttttttggtttgggttttttgttttgttttgttttgtttttgtttttggagacaggatttctctgtattgctttggagcctgtcctggaactcgctctgtagaccaggctggccatgaactcacagagatactccttcctgcctctgcctcctgagtgctgggattaaaggcgtgcgccaccaatgcccggccatgttgtttttgtttatgctgtatttgtttatgtatagaagtgttgctgttttaccttgcctgcctaaggtacatggttggtctaataaagagctgaaaagccaatagcaaggcagaggaagggtaggtggggctggtgggcagagagaaaaaggggactggctagacagacagacatggggaagcaggatgaacagtaaaaggatgaggtaaatgggccacagggcagcacaaagagtattagaaatgggttaatttaaacaaaaagagctagttagaaaccagtctaagctaagactgagcattcataattaataataagtctccatgtttggatttgggggctggcaggccaagaaagcctgctacaatgtataaaactgtgtgtggacatggactcgtcattctagccatggcagggtgggagatagagacaggcagattcatggaagctcagggaccagatagcatgacttatgtggcagagttccagaccattgagagactgggtctcaaacaaaatatggaaggagcctacaatgggaagtgctcattgtcaacttgacaggacctagattttactgggagctgggccataggatatgcttagaagatagattatattattattatcattattactattattgatacaaggtttctctgcaggcctggctgtcctggaattccatatgtagactaggctggcttcaaatccccagaggtctctctgcctctgcccctggattaactgatgtgggaaaaatctatttaaattatggacagcaccatttcctggctagggaggggagtctggactgtgtaaaatagagaaaggtagctggacagtaggttgtattcattcgctgttttcttagagggtataggatttcctggagctggaattatagatgactgtgagtcacctgaagtggtgttttctacaagagcaggaagtgctcttaaccaatgagccacctctccagaccctgctctttgctttctagttgtgcatgcaatgagaccagctacttcaagcctctgttactttgatttctctgccttactgggctgaacacttgaagtgtgagtggaataaacccgtaagtgtcttgtcacagcaacaggaaatgcctaaggtcataaactgaggctgccctctgacaagcaaacgatgcacacactcacacacacacacacacacacacacacacacacacacacacacacacacacacacggaagctctctctagggctttccttaactcagtagatgtcctttatcatgcactggtgcttgactaagtgctccatttgtgctgcaacccacgggcagttgtcattgtccctgttttctggaaagggctattcaggcacacatacccagtaccaagttccctatgcatttagtggcagagccagagcacatgccacccggcgtcagaatctgagctcagtctgtgacctcttctccaggggtgcctggagaagcacagctctctctgcctttggccgtctcaatcttcccatgtttcctgtgtggagtacccatgagcctctctgttggcaagctgggaactgcttgatgaaggcaaggttgagtgcattcactcctgtttccttgtaggccctgatctctgggctgagtcatgaccttggagggtgagaatccagtgtgcctcaatttgtcctgaagccctcctagactatggtcacttctgagtccagggtttctctgttggggtatagcatgctcatgatccttagtattgataaggctaatgtgacatgcagatatcctaagcagggtggctactttctgtgttccttttcttcacttgtcccacaagagaagctcacacactcatgacagctgaaggcaggaaacctataggttgactgttaacccgtattgtcttaaaaatgaaattatttaaggtttccacttgggagactgcattagctgttggaaagcagcagtgatgggagaatttgcaccccagtcattggcagacactgatcagagctcctcccctacccctggaaatccaactgttatcacaatgtttacaaggctgaaaaccagcttgaggcattcaggctaacaacagaagtccccatggagctggctgggggctgcctctagaccacggcttgcaggtaagtaccaatgttgcccctcccttcatcaagtgctggaccacactttctgccagaaatcacatacttgatgaagatggagaagtgagggtgtgaaagggaaagacacactatcaaagccaacaggcctggttggagctgtgacttgaaccactgctgtggttattggccatataccaagagccccaagctcatcagagagtcagggcattgtaagaggtaatgtgtataaagagcttagcacagatttggctggagcagaatatagtaaacattaatttaccaggaggcatgagtgggatcaggatccacccacgtggactctcaactggcttattttattattattattttttttattatgaggtcttcggctggtcaagctgctttgcctgtctaagccaagaacttgttccccagctaagagaggataataatagctacctgtaagagcggataggaggatggagataaaggatataaagtgtctggtgagaagtgggtactctataaatgggaatgattgttcagacttatcttttatttcattagacaagcaactgttcatggtcttgtgcaggcagctggagccagagtcatggagacaggaccaagtctgtgctatgcctggcttttccctcctggacaggtcagcccttcagtgggccatggcttgagaagggcttcagaggcttgggacactgttgctaggtgctggttgctaagcaacactctgtttcttctagcttggccatctccaccttaggagggccagcttctcttgtgctgctcctgcctcctgtggcctctaccgacctcagagccagttgcagagggcaggtgagggtggggcctactctctagggccctgggagagcacagagaacttccagaaggaggtggttggggaagcaactgagtaagagatgggggtgggggtagttcacaggagagaaatcccaggtaggcagttatctggtcatgttctccctaagatgcacatgttgggagggggttggaccagaggaccagaggaccagaattcagataccccaggtctgaatcccagctcttgtctcttgttaagagcttcagttcatttcttggcactgaagtttcttagctctaaaatgggggcatttgaaagcaggcatgagacaaaccagtgtgagagttggagatgggttcttcctttggtttgggaagcagtgtccagaaatggggacaggggccttatgaagaggattcaagtcatgaggggttattgtcactgctgaggttggagccgggatcagaactcctaagggcttcctgggtttcttctcaggcccacggggccctgccccacagcaccatgatgggaaaactccctcttggggttgtttctccttatgtgaagatgagttcagggggatgctctgaccctctgaagttttatgctaccagctactgcacatcatatggtgaggaccccctatgtgggagctaccttcaggatcctgggtgggaaagggccaggagaggtacagtctctaggtcaatcttaccacagtgacctgctgcacagagctaatctattattccccgaacccaagggcttacactaccaagctggccttgtctgctgcccccttccctcgccctatcactgcagccagtctgccacatggttcttgtgtccccatgccattggctgtttcctgccatcaaagtcctctgaagagtcaagcctacccagctcctgtcacctgggatgttgagtattcccctagcttagtggtccctgagccctgggggatgctaaccctgactgggaagccactcctctccttctgatgacctttggtcctgtctccctcttgcctcctggcaggtcgtgaggagttcaagccccgaatgggaagccatacaggcacaggctacaaatccaactatcggaccctggtctcctaccaaccccgactggacaccatggataatccagccacagggtacaattcccattacccttttcctcctacctctgctctactggatcttagctataagagatgtcattgccccaagctccaaggcaaggcctgggtggctctgggcatgctgcccagtttcaatgcttgtgagagggatgagagagagatggaagcttctgggaataagtaatacagccttcagccccagaacaaaggcagatggccctggaggtcctagctcttgcttcttcctaccccttagggaacaactccatgacacttccaagtctgtgaccagtcagagctactgtcccctagaaatgcctgatggcaagcaaccattaccctggaacctgtaccagacctcctctggctatgggcgagagaagttcaatactgtgccactctccaaggaggtcagtcccgggcccacactgggaaggagtgaacccaggatatgtgcaggagggcagggtgggaggggggttccttctagcaagcgggaacagcacttccaaccactgcacaaagctgagatgacatagcatggaggagccgcagtctagagcaaggggccacaccccactgtgatcttatcttcatcctcgctatccccaccatcactcccacctccatttccccccagccctgtcactaccctcacctctactccatcctcagagataccagtgtcctattcatatgttcaagccatttgccactgttctcactgcctcacactcactgtcataatcaccccgtcttctttgcttctgtcatcattaccatcattcaagccaccaccatggccatgagggcaggtattcattcatccaaccaatctgttttgagcacatcttaaatttggagggagtgtgctcaggctgtgggtagggtgcatgcctaacattcatggccctgggctccatccccaggaataatagtaaatacctgtaatcctagcactggggcaacagaggcagcaggataagaagttcaaagttatccttagctacataacacaagtttgaggccagcctgagtcacctgagaccgcatctcaatttaaatgatgatgatgatgacaggagatgtggctcagagattgagtgtttgttgcccttgcagaggatgggatttcagttccaagcacccacatcaggagactcataactccctcgaactcgagctccagggtatctgatgccctcatctggcctctgtggacacccgtctacatgtggcatacataagcacagacacatactaataaatctatttggttttttaatgatttgttgtatctgtatatatcctgcacaccagatctcattacagatggttgcaagccaccatgtgattgctagaaattgaactcaggtcctctggaagagcagccagagctcttaacctctgagccatctctctaaccccagtaataaatcttttaaaataaaatcaattttaaaaaatcggaagggataagagtagaggaaaatgcaacatgggagaaggagagatgaagtgtaagcccaagggttggggcagaggttactatggtgacactgggaaaggttcaaaagagggtagcattcctctagccatagctatctaagggatgtgtgctccaggcagtatgtcagtgccaaggccctgaggctggactctctagttgaggggcccaacaaggagctgagtgcctgcagcagcttgaggacccaaagctcccacagactgctgccagggtatgagagtcactatgagcaagatgttgcaagctctgatacaggagggaccccactggcttcgctatcatagagccagacagactgccgtgaaggtgctctgtagaaggagggtagaaagtgtatggcactccctcacctgccaggataaccatttgtattccctcctccaggttaggaaggtccacttcgatacccaggatcatgggcctcagaccatcacaggactggagcccaaggaggctcccccgctccaccagcatcagggcaagggctctgtagagtgggagaactcacactatgtgagtgggtgtctgctggggctggaatgggaagggctgggggtcacaccagcctcctccgcctgaagaggttggacctgggattactgtcccccgggagctactgcatacggtctcgggctccaagaaacaatgcagagagcaaggcattttcagtttgatagttatcaactgcatcaaagtggccaccataccctgccttgtcccatgtgtctcatgaccaagcttatatgtattttcttccattagcttttctcccttcatcatgactcccttgcttctgtctgggttcctccaggtcatttccaggaactcaacatggtgtgtgacttggaattatcatggaggcaattgggacacagccatgcctcatcaggcatattagatgtcttttggggtgttgtgttagtttcctcctctaaggcctattgggagttcatgtatccaaagagctactactatcatcatggaatacccacctcccaccttggcccactgggtccctattgtcctgccttgtgtgttccagggcccacgcttcatgacttctgagtacaattccaagtatatcaaggagcctccaaaccatccaggtaggccctcccaactttgtcttccttctccaactcctaggggagactcggggcactggagctagtacagttctcagaagccatcaagggagaaagaagaacagacataccggtagcttcagggagctgtgtcctgtcccagcactgatttcagggctctggcctgctgttgtagcaggtctcaaggacctgcccacagctactcctggtctgtcaactcccattcttccttctgctttcctggcctggagcctgaagtctgtccctctcatgctgggacactgaggcagccctacaaagtacagagacctgtggcttttgcagatctcttgctcaagaagacaattggcgccaaagaagagagtggcttcactgaagagtctaccaagaatcccattgtcttccagccgccctcacaggcctttcctggagaccctgtaagtgtagactcagaaacattgaaattctcaagactagggctttatagtttacttttgagacttctgacacaaagcccctccagtcaagtatggaatgaaagagcaagagagaacaccactgctgtggttcagaatcccactttacagatgagaatactgaggtccaagtagatgaagaggcagggccgaggtcactaagtgctcagatgggaaccttccccgctgactgccattcaggaccttggggttggtcattctacacaaactctgcctgttcctcagttgctagtcaaacctgtctatacagagtccttctgcatgcttgataacagcaaaggccggagtcggagggcatgggagccactaagggcaagggaggctaagctgatttctcactattcattccaggtcctccacccaggacggagtgtcaccaagtcagacttcctccctataagtcactctcaggtaggctctgtgctcctgcgggggtgtgagggggcggcatggccacctgtgaggacagttgcacctgggttggaattttgaaggggtggtacccaaggctgctttgctcccttcagggaagtgagtttctccctgtgctggccagaggctctgatcgggacacaggatacagccgagtgaatgaaagggtcttgaaccccagagtgagtgacaggggcccagcagggaagaatgggagcagacagattatctggagaagtagatgaagggtgtctcagagggagtgtgaagctgggggctgtgctttgaaacatggaatgatttggcaggggtggaagcacctctacccatccttcttctgtcctaagaccttggcaggggtggaagcacctctacccatccttcttctgtcctaagacctagccggccacccagcctcccatcttgtggctctattccttacagatgcctgctccaagcccacagtctgccagcgtgacccacaggtcctaccagcctccccagaggatacaacagacaaatgttgccatgcttggcagagagtctgtggggaacaaggtaagagtgccatgctcatccctgcctctaactgctcctgagtcctgaccaccctgtctccattttgtgcaggagcccacagggttcactattaacaacccgagctatgtccggaacacccatgaacctgacagagatcaacggtacctgactacctacaaccaagggtgaggctcccttcctggctgaaagctgagacccatttgacagactgcaaatgaggcagagcagataatgaggccataacctatggaaggagaactaagacccacgctgaactctcccagacacagacggtcagctgagcattgtgtgccagcccttcacttggagagtggtctttaggggggcatgtggaagttgaaggcaaaggaaagtagacaatgatgggctgttatgaggccagttgtcctgtggcagaaactctagacaacagtgtaaggcacgcagctctaagctaccccctccagtattgtcacatcccaggtccattagtcactagttaaaaagctctctccagggttacattaagcttcatgggggctccttgctcagaagcaggtttagcaactcaagggtagctctcacacagacaggcagagcaagatgttagggccaggctggtgggctcaggaagggtaagttgctaaggtatcgcatccattgcatgccaggtaggctcagtgctccctcataggcaagctatgagcctggaggagggcttccaggggaggcagcccaagagccgctggggcagcttctgagaccagcaccaggttggagtggcatctaggaacagcaaaaaggaagtgtactgcctttccctttttttttttttttttagatagtcttgctatgtggccctgactggcctggaactttctctgtagaccagactggcctagagcttgtggcaatagctccttctgtctttgcctcctgagtgctggaattatgcatttagtagcccacaggaagtggtttggtgggggcgggggaaaaccaggcttcctcccaacacacctcttatcaatatacacgcactgagctctgaagcccaagatctgttggtcgtgaagtgtgagacaggcctcagagagaggcaagcagtggtcaaggacccttgcatcttgcgtcacattaggtactttgagaacatccccaaggggctggaccgcgaaggctggactcgaggtggcatccagccccagaaaccagtaggctacgctctcaatgagccagtcacccgcatggactccacccccaaccctacggagaccctgcggcaactgcacccccatgtgggaaggtagtatgccacctcagttctgcccttgtcccctttcctcactcggtagcctcctctaggctggctcagccctaccccttgcctctgctgtgtctgtgaggccatttcctcaggctggtcttaaatggcctctggcctcctgcctgcccagattcattccctcggctctgtctggtgagtccttcctctgcatgtctcctctcctccatggtgttggggctgtggaggatagacttaaagatgaatgagctgtagccctgccccttccgtgactcctgatcagctcttcagtgaaggcgccagttggcaggcagagaacatctgtggtttggctgtccttgtctgggctggccttgtgggctcttgggatctcaggaagggaggcagaggagagaggcacaaacctggtcacccatccttctatcggcttcccttcttcctgcaggaccttggcttcaattgaccccttctatcgagacacacctcatagcaaccgctacatggctcccagctgagtcttgaagggtaaggggacagggtgccctcctgcatccactccctgggaggagacatcattggccagctcccttccctgggttaagttaagtttcgagggatggggtcagggtgccctttgtttctactagagtgtttagaaccaccctagggtccatcctcaaaccttatctttgttccttctacccaggtttaccatgatgggacaatctgctttccccatgctccccaagatcccccagttactttcctaaggaaataaaggacactgaatcagcacagtattacagtcactgtggggcagggtggtgccaggcaaaggtactgagctagggtgtatctgagtggagggttcagggtcagctttggagtcaggggacctcctggagcacctgagctacagtggcttcgaagacaagatgcatcactgtttcctgctctgttgagataaggccctcagcttgtgctgtctaggatagcgatcaggcaggtcaggacagaggtgggatgcagggacggggcagagggtaggtgtggtgagaggccacttactaaattccctaggtctggttacctcaataaaaggggagctcatattaaagcaggacttttgggtcccactgacggcctcagaagagagaagcctatagggataggccagggccagagagatggaggggactctgcgagatggacagttagagacaagcacagggtcaagggctgatgaccaaggctgggtctcccttcagtcaaacaaccagaggaagacaacatcttttatgagaatgacaacaagttgtctgttagagagatgccccactgagcacggtccccactgagcaaatatgtggggagacagggcagctgggcactggagctccttgcctgaaagcagaatctagcctggctctcagcacctgttgtcactcagccaggtatgtgtaactgtatgctgtgactctattagcaacaccccttacacctcagaagcctaggtcctacggaggtatgtgggttgctgtgggtcctggagggcagccagatggcagcggtcctgaacttaggggtgtcctcttagagctcaggctggcctgaggaggagatgctcactgagggtccagcagccattcactacccttatgtccttttgtgcttctcagtgggtgtccgcgttgcagttttgctggccctggagcccagctgtacccagtgcagtcctgtgtagcaggccccgggggctgtccacagcctggaaggggcgccatgtgggctgtgggaggctccagctggttccagggttggaggaggggagtcagggacacacagtctctgggctctaaacccagccagactcagggcccagtgacaggctcacaggctgtgcgtggggacttgctggtccgtggcctacaacattacgggtgagtcaccaacccgagacaggcctaggtcacaacagtgtcttgtcataatttcatagtggggtgagggcacccataattaaactagtccctccctgcccaaatacacacacacacacacacacacacacacacacacacacacacacacacactgtaagcacaaaagcacatacaagcagtttaaaaggacacagagccccaaagacacctgtatacaaacacacgggcacatcagtgccagcaaaatacagcagttacacatgggcacggtggcacacgtctgaggagcactagtgaggcagaagcaagaggatcaggaatttaagatcatcctcagctacatgagccagcctggactacatggacttcaggaaaactttaaagaaaggcaatagcacaaacatggagcacacctggaaacataagaagaacatgtatacaatacactgtctcatttagacacagtgatgaccaaggacatgggtatgcagacacaggaaaatagacatacaaggggtggaaaagatggctcagtcagtaaattgtctgttgcacaagcatgaagacgtgagtttggatccctaacactcgtggacaaaagctaggcacagtggcctgtgtctttggtcacagtgttgggaaggtagagacaggagattcccggagcttctggagacagcgcagctgaatccatgagctttgggtttggtgagagattctacctttaaaaataagtggcgaggcaatggaggaagacattcaaggtaacacgctacccctctctcaagagtaaatgcatgtgcatatgcacacatgcacatatttgtacataacacaatacacaaatagataataacttgcctggcaaacacacacactgacacacatgtacatatacacacattcacacacccacggacattcaccacccccaaccccactccacttcttgaatctgtttccccatgagagtcactttacagctcatgtttcttgcttgttctatttctccacctggaccaacagcggacatggtgtctatgtcagagacaatggagtctgataacatcctttctccgtttcttctcttcactctgtgccctttatgccctgtttccaggacatgtgaggtgaggaactccccatgatgacttgagcaggggctgtggactctgcctctgaggaggcatgaagatatactgtgtactccctggatttccttttctacctacagcacaggctacagcctgcttcctggtagacaatccatgggtccttctttgggtcctctgccccagtccaaggaactctgtgaggacaaggcagcctaaggtcctggggcaggaaggatgtttagaaagggtcaaggtggagccatggtggtggttgtagggtccctgcctggtaggtctgagttgtctcaggccacatggtcataagggatgtaagagtaagcctgctggtaaggggtggagttggaatccctaagtggcagcgatagcctggtagtccttagagatctctgcaatgggcctacagggagctgaggtgtgggaggacagtgggggatgggctgagccgggggcatgactaggccgtagaaatgggcaccctgaagaaggcagactcctctgatctgaagacctggctcatggccctccatattcatctcctggctgcgtaagactcagcaggggcacaaacaacatctgccttgttcacagctgacataccagagcccagcacagtgctgtccagaatgtttggaagctcatggtgaatataggtggatgggtgggtggaattatactgtttgcctgtgcaagtaccagatgtgggtttcttggtgtcacctgccctgtcaacaacaggacattggtcagcaggccccttgcatctgtgcagcagacagctgaggctctgctgtgctccctgcctagccaccttggctgtgcctctcaggacatctgctgtgctcttttttgactgcattgccctttcagtccccccctttcctgtcatccagcctccctgaccctagcagctttcctgttggggtgaaggggacctacattccaacctggcgggtgagcagttggtctatctaacctggctgggaggctgtcccttagcagggctgggccccacctgtccccagagtcacactctgccagacctttgtggcagctgactactgtagatattccagaatgcttccttccccatgctacagataccttagaaaaggttctaggggtgccatgctcgtgattaacctttattaagctcccacggcttgccaggtgctgagaatattccgtgggccttcccttctgcagctagagcacagagtgtctccctgtgggggcatgctgaggacacatgtaggcaggatggtgacggcattggggtggaggtacagtgtggggcagagagggaatgaagctgggttaggccgtacctctggcacacagggacatgtatgtgtgaggcagctgcccgtcacagcagcctggcagctgatgttggcaggtcccatctggcctgcagcacgtgatgacacaaaaccagcagctcatggactagacagctggccagctgggaaaacagggctcccaggagagtgaagggggggtgttgttgaaaggcatctgtctgtgggaactggaggctctgggccggttgggggctgaggatggtgggcatggtacacacaggcagatggagcacatgaaacttctccgatttcctctctgaccatctggagagccacccattctccaggaactgttccccaaacaaccacacaggcagaagggaggaatgggaccaggggccgcccacccagggtttctctcgaagggtcagggcccctgagtagttctggcttcctccaggcactgctccaaacagatctgccaagaaaagtctttgaggaacacatgtcctctcccaacacccaaagacctttggaataaccaggtcaatctgagccagagagaagccacctgcccaaagtcttgtgactcgggagcacatactgtctctggcccttcttcttagttcacttagctggaggcctgggctgggcaggagcctagaagcttctcatttgcagccagcgacagtaagggttttatttgttttgtgttaaatggagagggtgtgagtgtgtgtgttagaatgtgcaaggtgtttgcgtgtgtttgggtgaagtcctaggtaaacagccaagtcagagaggcaaccgcccaagtgacccagggttggatgatgtcgaggtgttttcagtgaagatgctatgagctccaatgtccagtgacaaggtaggaccctaggcatacaatcttacaacagttgccttctccctctgggacctggcaccctaggcagaaggcgcatactgacaactcagggaaaacttattcccgggcccacagaaacagcatctggtggtgggggctccttggttcacaggagaaggtaggtgtagggtgagggatgggtggaggtggttcatgtgactcccagagtggtagcaacctgggtctcaaagctccttgaaagacacagaaaccaatttgatgaccttattttatattttcacattatactttattcatttattttgtgtgggtaggggaggtgagtacaaatgttccatagctctctcaggccagaggacaacttgaaggagttgattctctctctccattatttggatccaactcgggtcatcaggctttgcagcaggtaaatttaccctctgaactatcctgctgacttgatgccctatgttattttattttattattttattatcttggggggtcagagtcccactgtgtagcccaggatagtgtcgatcctataacaccctttaaaaataattgatgtttttagttttatgtgcattggtgtttttcctatatgtatgtctgggtgagggtgtcggatcccctggaactggagttacattcagttgtgagctgccatgtgggtgctggggattgaacccagaacttctggaagaatagccagtaatcttaacctctgaaccatctgtccagtgcccctgatatcctttggcctatgacatcctatgacagtcttttggtctcagtgtaccaagtgctgggattacacacagccatgacactccaaatgcaggagacttcgaatgtacaaactgtacaacacagaaatataattctacattttagaggttttgaactctcacataatcctcaagtggatatgaggacaagacttagaggcacacagttatcttctatggtcccgagttcccctgctgctctggatagatcctcagctgctgctcccctctgtcaggcagaaccccgcttggctgttctcccctctatttcaaaatctgtggtacttactgggggagactcctgggacatgtagatcacacacatgtgctcagctttcaaggtatgctgggtgtcttagttagctgtctattgctgtgataaaactccatgaccaaaatcaacttggagaggatagggtttatttctttttacagcttgtagtctagtccaacatccagggaagtcagggaaggaactcaaagcaggcatctagaggcgggaattgaagcaggggcagtggaggagtgctccttattggctggttcctcatggtgtgctgaacctgttttcttaaggcacccagaacaaatagcccagggacggcaccactcgcagtgagctgggagtctacatcttgctatgtaactgaggaggtagctcagctgatagactgtttgcctagcatgggcaagccctgggtttgatccccagcaccacttagacgtggtggaggtggcacatgcctctgattccagcacttggaaaatgaccccagaaggatcagcagttcagggccatcccacataccaagttcaaggccagcctgggctatagtgcatgaaacactgtctcaagggagagaagggggagatagatagatagatagatagatagatagatagatagattgtatgtgtgtgtgtgtgtgtgtgtgtgtgctcacttgtgtcttggtctttcagtagctggacttaacaaagatattagtctagttattcccagtctcaatttccagtgaatgaatctgtctttaaagtctcaaatccaagcaggtcaggatttctgtattccttgtcatttccttctccctggggagtgggctatcttccacacagctggtaagcaggagagacacacctgttcacatggttttgttttggcttaaaaaaaagccttttcaatggtggtatgtgcctttaatctcagcacttgcgaggcagaagaaggaagatatccgagatcagtctggtctacataggaagttccaggccagccaaggctgcatagtgaggttctgtctcaaaaacaaaaataaataacatgttaacattggggctgaattgcagatgacccagattgggttctcagtacccacatggcagctcacaaacacctgtaactcgagtttctggggatctgatgccctctctggcctcctcaagcacaatttaagctgatagtgtacacacacacacacacacacacacacacacacacacacacacacacacacacaaaacactcatacacaaaataaatctttataaaaattattagtgtatatatgtgtatctgctttgtgtgtgagggtggtggtgtgtgtatcacagcatttggaggtcagagagcaatactgtagagtcagttctctctacctttgtagttctggaatcaacctcaggtagtcaggcaagcaaggcgagcactttttttttcaatccactgagccatctccttggcccagtttgggctttttgagacagggtttcatgtgtatcaggttagcctcaaacttgctacgtcattaaagctggccttaactcctgatccttctgccatcacctctcacctgatgggatggcaggtgagtgccaccacatctgttatctctgtgtccttcatcatgacccatcatcttccaactgtccatatgacctggcccatgattttctagggtcacagaactacccctgcagctggcttatgactgctcagcccctttgagcttgccaccctgtgccttaacacacctatacccatcttggagcttcagaaatgtctgcttgatgctggtgagcaaagagtcagaggagagctagctcacctctgcctctgctccaaggcttctgcgacaggcagaagctggccacattctcaggcctcagaactggtgccctgtgtgctgggggcccccacacatgggccttctttcttatccccctcggcttctttccctggcacctgtgaggtcagggctactttccttctcttttcacaggtccagcctggatgttcttttgggtagaatcctggcttctgtaatgatgcaagctgtccctctccagggcttatgggcatcagctgtctgctcttaagttcaaaggcgggcttttggacctgcaaagattctttttctcattcaaaccctggctgttgtaagactctagtctcagctctggatttcaaagcctcttttgcagctctgagcctaggatttgcctctttgttctggttcccctggagagtagcaggctgggaagccagctccacttatgaatggaggggaaggatggaggatgaaggaactgctggtcctgagttaaagccttgcttgaccagccacccagccccgagcttcatgcaaatcccccagggcagagtggtgagggggagggagaaggagaccactctttagagagtgccaaaaattaggttggtagatagctcagcaggtaaaagcacttactgaccaagcatgaggtcctgagttcaaagcctgagaattaggggctggggagatagctcagtggttaaagcacttgcctcacaaacatggggcccagagtttgaatcctcagaatttagataagtgctgggtgggtctggtagtcccctccccccataattccagcctcaggaggcagaaacactgaggaaactctgggcttgattgagagaccttgtctcattgaataaagaggaagagtaaacaaggataattcccaccatcaactgtgattatctacactcatgcttactcacacgaataaacgctacctacatgtgtgcccttatacacacacatagccacacacacagagagagggggtgggggaggaagggaagaaggggcagagggagagggaaagaggagagagagacacacacaggaagggagggaaggagaaaggaagggagagagagaagcgagggggtgaaggagagagagggagggtgagaggagagagagagagagagagagagagagggtgagggatggagagatggagggggaaccagaatctacataaaaaaaatgggtatggatctatgcagctgtaactccagagctggggtaaggtgagggaaggagacagaggatcactgggatttgctgaccactaactagcctagctccgggctcagtgacagaccgtctcaagggaataaggaagaaagggttagagtaggacaattaagttctcctctgtctgttgtgtatagatgtgtgtacctggcacacacactgcatgaaaatgttatttacttatgaacgggtttttaaaaatttgtttttagccttcacccttattgtttaagtgtgtgtgtgtgtgtgtgtgtgtgtgtgtgtgtgtgtgtgtgtgtgtatgtgtgtgtgtgtagatacacagcacgtgtgtgtatgtgtggttttggaggtcaaaagacaacttgagtactgttcctcagaggccatctaccatgttaagtaagatagggtctctcacttacttggaacttgttggttaggcctggatgccccgtgtaccccagggatccctcttcatctgtctctccagtgctggagtttcaagcacatgtcgccacacagctttttacatgagttctgggaatcagattcaggtctccatggttttgagacaagtacgtcaccaactaatgcctttctgattttgagacaaggcaagtgcctccccgccctacactcagttctccaggtgtaaggaaggactgaggttcagagagattgaagagctcaagtgaacaggtgatcccacgagaacaggaaacagaggctcctgctctcctagagttcacatccttaacaacctttaatttgcaacccatgacagagtcccctggtcaggaacccattttgcaacatggtggtctactaagatccaccacgatagcctggatctaccacgtccactactccctttcatcacactctttgacctctgttgctgtggctctgttgtctccagggaaggggtggggtggaaggtgtagtcgggtgaccatgcactagcattccgtgtggtccaaaagccacatctgggctcgtgtttcactgggctggaggagagatgtggcagagactggctccattccattatgcacccagggctcgagactgcctgtaatttgctatcaggaaacactgaacttgggtcccctggacttgggggcctctttgttgttttttgaatctgtgttggagttctgagacttgttctctcagttggaggatccctccgtcctcagttaggcaaacacactgagtcctcttgctatgatagggagtgggggagggggtctgtttctccgtcacattcgtcttctccagctacagcagaatcatcaatttgggcactcctggaagtcttgttttcagactgaggacaagcgtttgggcacactgggtggtttctttgatttctctcaaccaactgagtcaatgacccaaggtatgaaaagttttggcttcatgattagatggacctgcacctcagctttgtctcttcccagctgtgtgaccttgctcaagctgcttaccctctctgaatctgtttcctcatctgtagagtgggagggtggatcggcagtgaagggtaaattagacagctcgtaggtgctcactagatgacattgttcattatcgtgtgggagagaaccaagatgagggggggatgccgagcaggcttcttcctgcagctgtctgttcaaatgcatgatctctgctctaagtctctcagtgacctagtattcaaagtcaacaccaaaaagcagctgctgcctccttaccttctctctctgattcatctgcaaccacaccctggtagctccaaggccccagaaagctcctgggctgctgtgcagatcccagaccctctttccccctaatgaccatcttcaggagcccacccctgtgcacaccttcctgccttacactcgcctcctcttgttctagctcaatgctactctcttacagtagcctccttgggccactcaggtgtcagtggcctctctctcacctcttttcttccccctcctcagtccttgcttcatttcttccacaacccgaccatcactcagctccttttgggttgactgtctccactggcagaaattgtcctcagagtatagactttagccgtggtgtgtttattcatggcaccccccagtgcccaggcctagaagcaggtatttgatgtttttgaatgaatactttaaagactaaggggattaagttctggctggtgcaggtaaggagacagccccgtggtatgaagaagccatcactttccttttcccatatgggagaactagagtagagctccaagagactttcatgaacccatgggaactaaacatatcagtgggtgagtcccttcagcagagtttttggaagccaggcctctagcttcttgcagacactaagagcacccctccccccccaacccctgcccctcacgaggcaatgagccctctccttgccctgacatttcctggttggttctaataagctggagtctttgctttctaagaacctccagtaatgtgacattctgtgactattcaagtctcagcaagcagccagtggccctggctcagggtagggaggggcactcaggaggagcctaggcagggtcagcaggggacacagaaggggagacaaaagcctccttctgaatgatttgtcaggtttttgttcttttatttaaaagaaaacatttagaagggcataggaaaatgcgaacaattgtgaatgctagagactaggtacagagtcgatcactgagagcactgagtttttgtattcaaagaaatcttcacataaatttggggtggggggtaagattatagctggtagctggcaatagaaagtccattttgaaggcctggggatttgtcctttgggtatttttgcagtgtgtgtgtgaacagagctatcagagccctggttcctccttgcaagtctcagtttcctgctctcctggggagtgggaaaaacctgaggggtcccatgctggggtgaagctaattcattagtgacacctcaacagggaccaggctcctgcagtgccagcgtgacgcattgagatgattgcttcactgccaatctgcgtgggccctgaaaggcagcagcacgttttacctttgcccactgagaagggcctggtgggaggtaaaggtacaggatctacccagagcaagaaaaagacctagaggaagcagaaggctggtctccatgctcctaaccccaggagcaatacctgactggtactgaagcagaggcactcatagggcttctgggacccccacagagtccaggcgggctgcctggtgctgcagtgccagcctgagcatgtggtgagggtaggctgactgggttccctcctccacatcgaatgtcccttggtaaagatgctgaggggatgtgggaggggggttgggaggtatttatgcctggctgggtttggcctggattcctggtgtgtgagtacccacctcttctgagaaatcctctcatgtaaggagaaaggggagtgttgggctgggaagtaacatggtctgggaacttgaggatcttgaaccttgtctagctgggccttagaatctttccatctggggtctgatgtctgggcttggctttttctaaacatggatcccttaccttggttgggatttatataattttattagtttcccccaggatggagggtacatggctgtttcctagtaacagccttcctctgtctgtgtttcccattatctgctcacccccaagaaatcccttgcttgaagaccactgctgttgctctgccctctgttcctatagctaacaaatatctattaaggctcagagaaggagaagcccgggagtgaaacaggatttgctggatggtttcattcctagggaattcaagaacaagccaggttgacccatgatgacagagccatgagccaagttgcctctgggatgtggcctgagggacacgagggctggggaggtagatcaggtagcagggtgctttgctcgaggctctggggctggtcccccgcagcacataatcagaacatagtggtgcggtgcggtgcgtatctgtaatccaggatcagggaggtgggagggccagaaacttggcgacctattgagttggaggctagcctgaagtatgtgaaactcacaaaggaacaaaagcttaaacaaaagaagaaaaagaaaagcccatgacagcacttagtcaaaatacactcaacagcaccgagggacacccccagtccttcctcctttatgtcattactttttatttttcagatagattcttactatgctgcccagcctggttaacatacgtggggtgaccggtgtgagtcatcctaccccccttttattgcctccatctgagacaagggcttgctctgtatcctgttagccttagatcactatatataccttaggctggtttgaacttgcgaagatcctccagtttctactctgaaagttctgagattacaggcctgagcctccacacctgggttcttgccgtgatactgctcaggctggctaaccagctagaattctagaggcgaatcagtgtttcttcctttcttccactgtcttaatgttaaaattgtcagggcagtagggatggtttggaagagctaaggtctgaacccatagctaggtcagagaaggctgggaaggagatatgaggtctgctgactgaattcccagggtgcaacctctggtggttgcacaaccctctagtaggtttgcctaatctctggaggccgttttcttcctcctttctatgggtttaataattcctttctcctagtttttgcattgtgagccagaaactctgttgaggaaaaattcacaggcagggtggggtagaatgatgtgttttcttttactgggaagttacatggttaggacttggggctcttgagtcacactgatttcaaatgccatttttttttttaaagtcaacaggcttaactgcaatctctttgagcttcactcagtgcctctatctttaaaatatgggtagtagcttttagcaaagcgccaggcacgtggaacgttggcagagaggaaggggaggaggcaggtcaaaaggctgttggtgagagcagccgagtgacagaatcaaggtgattatcgttggtggcactcaaaggtggtcacttgttgcagtcgtccgcccatcacagccacacacagaccttgggtatcctcggagggtcccggataggagctgcgggtttggtgtgtgagagcaccagcaatgggcggaacccagcgagggaggagtctagcatagtcccgcaaatccttatatctaaaagaaggccagaaggtaacatcgttcctcgttagtccaatataatcttgaagtgacccccaccccggctctctgggcgactgttcacacgccgctggacgggaacgaaacagcaagtggcctcgccttcaggtcctcttccaatgtccacactcctccatttcttcagtcccaggtttcctcctcctgggaccatccgcctcgaggcgcacacagctctatcaaatgacccgttgaagcaggtgcagtcagcgccggacgtcggggctcagcgctagccccgtgctacattcgcgttcagcgctgcctcggctctcgctagctccgggaagggctagctagccagggacccgctttagcttggggaccccactctccggggccgccttggccccgccccagcccgccctccctctgcctcattggcagccgcaagcgcgtcgggggttgccaaggcgacgggtcgctaagctgcgagtcagctcgaactccagccagtcggcctccggcagaggcagcgggggaggccagagggcgggcggccgaacgcggtgccgggcggcggggcccaggcgggcgcctcctcccggcacggcccccctcccggcacacaggcaggccggggcgggggccccccgaggccggagcggctcgggccccgtcggggcggccagggcggggcgatgccgggtggtggcagcgccggcccgggctggggcccgtgaccatgggtatcgcggagtccacgccggacgagctgccgtcggacgccgaggagcagctgcgcagcggcgagcagcagctggagctgagcgggcggcggctgcggcggctgcccagcgcggtgtgcgctctgagccgcttgcagaagctgtatgtgagcggtaccgggctgcgcgagctgcccgaggagatcgaggagctgcgcgagctgcgcatcctggcgctcgacttcaacaagctggagcgcctgcccgacggcctgtgtcgcctgccgcgcctcacgcgtctctacctgggcggcaaccggctgctggcgctgccacccgactttgcgcagctgcagagcctgcgctgcctctggatcgaaggcaacttcctgcggcgcttcccgcggccactgctgcgcctggtggcgctgcaatcgctgcagatgggcgataaccggctgcgcgcgctgcccgcggagctgccgcgcatgacgggcttgcgtggcctctggctctacggcaaccgcttcgaagagttcccgcccgcgctgctgcgcatgggccggctgcacatcctcgacctcgaccgcaaccgactgggcggtttccctgaccttcacccgctgcgcgcgctgcgagttttctcctacgaccacaacccggtcactggacccccgcgcgtggcggacaccgttttcttagttggcgagggcgccgtcgagcgcatggctgagcgtgacgagcccattccgcggccgccaccccggcgtccagtccgggcttttgaagatgaggaggaagaagacctgctcataggaggcacaggacccagggccctggggcccgccagggacagcctccgagccttggaagcccctccaggattgggcacctgagcctatgccttgagtgatgggcttggccactctggaaggaggggctctaggaggccgtggctgtctggttatgggtgccgctgcgcctcttattggggcagggaaggagcggcattgagagagcagcctggcacaagcaggcctgaagctatcttcagacactcctgggtagtaagaaagactccctgggaagacctctgggcagttttcagaccaagaagtctgggatagagccactgacggtacaacagatgagccggttctcacctggaaccagggtcaccattatccacagaatcatccccactctgacactggatgcccagggtgcctattgctttcatctggggtttggatctcctaggcctaccctagttgttgctggagccattacctctggggtggattgtaaggaggcaaaacttgccctcctatgtgtgtgtgtgggggggggggggttgggtctggccagaggtagggcatagggactctgtccagaagcaggacatagattggggcctaacaccttagcttcccttggctctccacctgtcccccgatatctgtatggagcacagaagacagggtcttcaccccacctttccttctggtcccttctcccagcatgtgccgaaagattgctgggcaaagagatcttccctctcctacagcctgtgtcctcagtagttaagtttgaaaagaagccactgtgcctgtagggcctcctgccccaaagagaaagaggggttctgtattctaggaggctgctcagggcctccctactgcttgcactctccatttccttacatgggcacagccagggtggctggcacggcatggggcactggacgggcaccatgtgcctctactctgtcaccagggacagcctctgagggggtgaggagacaggctctgcaattcccagggccagatccaagcaataacaggaggaaggggccagaggacactcagggacactatcaggggctggagccccagaaggtagtgttttctttaggaagaaaaaaaaactggttgtaaacataaattatatttcttggagaaagaatttgtgtttcccacatgtctatttatttataagcccaggagcaccaagttccactgctgtggctacacctcccccacccctgtaccctgactctgtgtcagaatgaccctggccaactgctgtgtccttcctgtctggggaacaagtgccggctgcagaaatggcattggctccctgaagctggtcatctggcatctttggtcgtcgttttccccattctggcttaccctacccttggttgtgctgtgggggtcatctgctgcttagttccccggttcgggttctggttctcccaccagctgggctggccttcctttactgtctcaccagtactggcccctccctctgtgacttgtacttgctcccatctcctttgcctttctgagcctgggctccctcagttttggtcgctatcaccatggcaacgagggctgatgtcatatgaggccaaaaggtcaggctcagcccagtagctggctctgggtaaggagaaggctgggcatggatctggagtgcgataagactgtgggtggaaagagaaggtggggcgattggaagctgcctcttttacaaggagtaagacaagtgcgggacccaactgtaggctttgtctttgctgaggtgccatcggggctctgggccttcttggggtctggtaacttgggagtaagggtttgggaggtgaggtgatcagatggtttgggtcactagggactgacctcttgacccagaacttgccaggtacaggggaaacctctgtggaccaggtctggcccccttctggttctgttggctgagtgatctgggcctcaatttctccatctgtagctaaggagttggtctgatgctcctgcccaagactccactcactgcttacccccccatctgttttcgtggggccccaggcactccttttttcagcttggcaccattacctatggctgtttaccaaccaagctgaagctattgaggctgtctgaggcagatctggtttcttgtggaaagttagtctggttagcgttcctgctgatgcctgacacactgttatggatccctctaagaagatctgttgccagttcccctgatacagctcccttggaggtgggggaagcactatgagggggtcccatcatcacctccacccatacttggcccctggaaagaaggataagaggtgagacactttggggcacagcctcatctgtggtccccacacaatctcaggacagtcagaggtgggacacatgagaggacagggaagctctaaggagttggttgtgtcaggctagggcagaggccaagagagaaggaaaggccaagggaacagagcaggccagaggaggtgggagggcaagaaactgagagtctgagatccgcccattggcctatctgtggactcctaacccagtgctcaggtcatgctatggaagagccactccatccttggatggctggcaagttggcaagtgagatggatgaaagttatagcctgtctcctcccctctgaccctcaagtctccagtctggttcccaagcttccagaacagctgacttcttgactggcaggcagggcagagatactaggatgttagcagaggcctttcccggcttcattcccgtccctgagagagcttggtaaagggggaaaatagggtgattgggaaccggagaccctccccagaagcccctcccctcctcccatgcagccacaccggctttgtcatcgctcccaaagcttcctcaagacatcagggcactgtgactctgaagatggacatttattaccacagccaggcgtgccacacagaacgtatattcagacagggaaccctgcccaagggctcacaatctaagagacaccacactcgcacacgggtgcacatacagacacatatacagacacatacaggacccagacacagggagtggatgacttcacaagaaacagatggggtgggggctcaggatggagcatcaagcatgttcagattgtcctttgggctgtctttctcagagagggagaggagagcccagaattcagggaggccagtgagacctttggaagcagcgtatctgggagggacttgcaggagaaagtggtctcaggcacatgaaaggatggatgggtagctcagagcaggcagagaagtgagctggagttcagaggccctgtgccagcagccagggtctggcacctctgctgtgctgccccgcctatgctaaagctgtttcctgggtttacttcccccaaaggaaagctaaaccaaacccaggctggtttagggtgcccctggagctacttacctgatcccaggactccctccaacccctggaatagaagccaaaagaaattgccttttatccctcccatctgcatgtgcgcgttaggcaggcacggtacctctgagctacaccccagcctgcacacagcttttgaaagggatctttaaaccatattataggaaactgaaggggcagaagggggaagggtgggaagtggctcagaatggggatacttattacagattgaggaggcagctgctggccctggatgtgggggaccagaaggtatgggaccctcttcacaccagagtagggcagggctcatggagatacgcggttcccttagtgtctatctgaagcagatagttttccttctgcagtaccctgagaactggcaggccagctgccctggaccgagcagggagtggctgggaaattattgcttctttgtgaatacaggacactgagggcccagcaaaggacatggcttgccagagccgcagataggagggcactggagttcagtctctcaagccctcaggttggaacttgccaatggggctcttagattggagaatttttttttccaaccacagagaatcagcctagacaatgggttggagaaaggccacaggtccagcaggccaaccaagagctcagcctatcttttctttcccccaccaggacctggaaggaaacattgtccccaagtcatagcagctgagcaggatggtgaggtaatggttgggtgccaccttggctttttctgcctatctgggatggggttaaggaccctctgggaagagagggggtgcatgccccgctaggtgagctccaggggaggcccaggaaagaccactactgctaagtatgacacatgcctgacccaggaaatgcaatgcttcctggtgagtgtggagatgacagtctagacctgagagtgggctggaagctcaggcaggcccaagccactaaaaatcaagtcccagaggtgacagactaagtggagatagccccagactccccattctccccactcccagctgctgcttcccttgagggaagagagagaggagactgggacccacagaggaaacagccaaggccctactttttcacgatcctttatttatcagaacaggccttgccacaaaaagcagggcccattcccacaaaaatatgattttgcaaagaggaagattttgctggcttagagggtgcatatggtggaaatttttgtatggttctttttcccttttttttcttcatttctctttgctgcaatttttctttttttgtgatagtggatttttgttttattttttataaaacacttgcgctcaaggactcaaacacaatacaaacagcgccaccaattcccacccctgggggccccagctgagctgggaatccccttggcttttttttttttttttcttttgtggctgttttcctttgtcccttccctggcctctggtgctgagggcaggtggaggggtgtgctggggcaggtggaatttatacagcagttacatggagaagatggtcacaagaaaggatacctaaacaacataacaactaagtctagggtgcccacaagacatccagatgacactcataaaggggcttgggacacagtgaagagacagattggctctggtggtccctagaggctctgtggggtagggtggatgggcaggtgggccttgctctcaggtgtcagtgacaactttgctttgggtagcaccttcagagccctcctgccttgatcccctaggtcaggtgatggtggcctcacaacctcccccatgaggtaggtgaagtattattaccatcattttacagatggagaaactgaggcccagggagtgtggggtgacttgcccaagatcctaggatggtggtagcagagctctggtgccctccccaccctcaagtccccccctgtccctgctccccgattgccctaactgtcccatgcccagaccccttgtcacccagctgcctcttgtgcaaacccactctgcccttagcccaccatttggaacctcttgctggtatcctccactccagctacatgtgggtgctgaggaattccaggctggatcaccagtgttcctaggtaggttccgagggaaaccaactctaggggatgtgctctgagctgattggctaagtgtgtgactcccataaatctctgctattcttaaacccattggtggaagttgggtccctcagatggccccgtgggaatgctcagggaactgaggcagatggagtaaaggatagcagcaatttccctctcgtttccaggctcttggcagtaccctctcctatttccacacagcctctggggtccctttctgggggctacacccagctggggaaggcagttggggcagatcccacttaaagcaaaagttgcagtacagaaacatttagaattacaagtaatatgggtaactatttgtttcacaatataattattcactctacaaatgattcacctacaacataagagattcctccaggtaccaggggacacggtatgaaattcaacttaagaacatttttcatatgggcggaaagagacctcactgcctagagcagaaagtttaacttaaggggactcccaccaaaggaaaatatgcccaaatatctgtttccactgtgctctagatgtgtagatctagcacagagcccattctgtccttggggtgtcaggcttgccagccagggtagaactgtggtccccaacagttaacacagatgtggtggtctgatgccacctggtggtaggttctgggaatgtcaggctcaagtctgaactggctttgaggctgtgtcaccagtgggtgttttctcaaaagtgtacagagggatcatcctggcacccactgtttccaaggggaagtcagttctaatcccagcagaggctgggaggagaaacggcagcttctttgagtatggcaacctcagactcctggaatgttccctgcttcctctgtttgcatggtgtgcgtgtgtgtgtgtgggggggggcacaaaaagagttgctgctctggcagggaggccagggagggtgggacaatgtgtccagacagcctggaggtcaggggtagatcagataatgcaaagaaaggaatggaggtgctggggtaaggggtggggatgagggaccgtatccatgccagagtgtggagcagatgccatcttggcttgaatatgagatctgggaaggtgggggtccctggctaaggggttagggatgcctgagaaggatgggagtggtacccaggtggaacgccatgcacatggtgagtaggagcctacaaagtgtgagcccaggcccaaggaatgacattgtaggggagttgctactggggaattataggggtgggggctacagaaactggcaaagtgggtaccaggaggcagctgaagcatctgccctggtcccgatgactcctcctactcagctgtccatacccttcctctcctaccatccttaacctctacttggcccagccccacccatcctcatgaaactctgctactctccatagccggtcagcactgctggccccagggtgacagggagtgagcaccccctttcacatgtgtgcgcatgggcttacacatgcacgtgtgtgcacgcgtgtggacacacacacacacacacacacacacacacacacacacacacacgatagacacaacacaaatacacagggccacgtctccaggaccccagagcacgggctatacacttatcctcggcatccagggcccagccggcacctgaagctggggacgggcctggtgaccaggccgtggccaaacgcctcggccttcctctcttgggccccaaaagggggggggctagggaaggggtggcttctttccactccaggcactgccttaaagaaaacggggggctatgcccacctggcgggcctctggagggatctgcctatctggctcttgagctttcccccacttctttagtatcagcaaatcaggaaagaaagaggcaaagcagggaaatggctcccagagcccccaccccccaagctggactcatgggggtggggctggtacttcctagaaatggggcccagttgagttctggtacccctccctggctgagccctcaggttctcccctcacccaaggcaggggggccgagctgggcattgtgcataaagtggtcggggcatgatatggacccaggccttgacccttggggcctcctttggccccactcaggctttcagctgatgccactgggccacaggctgccgggggcgagcgatcatgtccttccagtgttttacttcacctggcccactcttccaggacaggtagatctgggaaggaagagaggatgcattatggcaggctatgaggcttgggccctgtcccacagtaacagcctgtcccacagaggctgttcctttccctccttgccagcctgacctagtttcctgcctgtgatatccctcgggggcctgggcatgcctggccctttgacatcagactgcaacctattttgtaatgaaggtcagggcacaggcagttggcttgggtgaccttccctgccctacgaggtggcaccattgttactgtctcttctatctcctggcatttcctgccaccacctaccccaaggatctgcactaggaactttcaatgtatcctagcaaacctgacaggtgagcagactacatgattagactcagtttgcagtgaggaaactaaggcacccagagttaagagttgaaatgttcaaaatggtacaaggcaagtcttgggggtctagactactaatcctgtccaagctcatgtcggggctccataacttgcagggctgccccagaaaccccccaaagtatgctcagctgagcctggcctggacactggtggatgcttaagaccaaggacattggaagaaaagtcgatagtgctgcaggatcctggccagggcacctaaggacgtcaagatgacagtttagagggtgagaaactgtttcagccccaagagcctggggggcttgacaactgagtacactgggctagctagtcctggatcctggaccaacaggtggagcatcaggggaagaactgaccaaatgcaaatgaagtctggtggcttcacagcaaggtcccatgtcagttcctcaagctgtgacagatgcaatgtgaggggctagcaattgaggacactgggcaagagggatattggtactctatgttatctttgctacttttctgtaaatttaaaattgttcactgggtttagtgtctcatacctaaaaccctcacaccgaggcaagaggattgctatgaatatgaggcccccaattcactgcataaagcaggtactgtgacacttgcctataatcccagtgtttgggaggtagaagcagcaggatcagaaattcaaggtcatcctcagctatatacgagttggaggccagcctgagcatggtggcacaagcctttaatcctagcactggggaggcagaggcaggtggagctcttgagttcaagaccaacctggtctacacagtgagttccacatctaccagggacatatagggagactattaaaacaaaacagtgggaagcaaacttctgttactgaatagatgaccacgcgcgccaagggtaggaacatttcgaaactaacttctattacaatagaagctatgtgtatgctccaagtgccagactaaacacttcactatgcccttatcaaatgctcccactccactgtgttgctaggacaacttccctactctcattatgagcagaggaaataaggctcagagaggtgatagccgttaagggtggagttccagggccagagggataggtcagtggcagtgtatgcctgtgttccattccaaatgtcacaaaacaaacaaatgaacaacaacgaaaccagaaccctccagacttctgtgcccatactcccaacattgaatcagaaacacaaggaatgtgattttcaaagtagaagagtggagggtttatgtcacagaattgtgtagaaaaattcaaatcaggtctgggtctggcttcttgtttaacatgcaagaagaggtcaccattgcggggtgaggcagaggcccaggcaggcagatctctgtgagttcgaggccagcctggtctatagagtgagttccaggacagccaaggatacacagagaaaacctgtcttgtgggagggggaggcgggggaagaggtcaccttcatccagaatctgcatctatttcaggcgattcttgcctgactctgggaagttctggagggctggcattagcttcgtttttcagataagaacacagaagctcagagaggtcaagagactcactctaggccaccctggagtgcaaatcaactaggagctgaagtcaggtctttggtttctggcaagggctccaccacagccccgtctagctcattccatgagcagggctgagccagtctgaaagcccactcagaaaacctttggggaattcaaagttttctcctctccctgtctgactgggtctttcctggggtcctggcctgtgctcattctggcccctgctgcgccgtaaggactatgcaccacacccagccctaccttgccaatgacgtcattgcgactgagcttatctttatccatgacagtgatgatgatggtggtctccctcagcttctctgtggggatgtcgaaggcgaaagactcattgaagatgggattcaggttcctcttcttggtcaccgtcttctttttctctacccgcttgtctttatacatcaaccacaccttcacgtaggggtctggaggcggtagaggaagggtcagagggacagagtgtatgtgttgggggtgggcgatcctcatgcccttctaggtgcaaaaacttaagcaggagctggctacatgccttctaagagggtgataaggccaggcgagggcaagaacaagagagattagggataatcagcaggtggacactgccctaatgttttatgctggcactctggacaggtcccccagcgccacacacagtggcatggaagctaggactggggtctccccaccacaatgttgcctttcttcctgattcagggaaacctggttgctaagatgacacctgacccagagtgtgtccaaagagttcctctgtctctagtcagaggagttaggactggtaggggccagggttaggacccctatatccttctatccttcatatccaaagtgaccctcatgccacaggaagctccccaaaccctcctgcccatcctgtcatgataagcctcagcacctgatgtgcccccgatgtccatggctttgaggtttcgagctttgataatattcacgatgatggagttggcagaggggttgtagcagagagacaagagcagctcccctcggctcccctgtagggcaacaggaggggtgagacagggtcatagggatggggttgctccccatgggccccctgcagggttgacaggtgtgggaactagaagggagggtgtggtcagagagcccagctgcccacaggtcccttcttccctctcctgggggacaccagcccctctgcctgtcactgtcatgccatctccttgcctctggcaggtctgtggttactcagggctcccaattccctaaacagagtcctgggctcattgcacagctcaggtgattcacccccaaattctaagctccagtactccagccatgggtgggagcaagctctctggggccgtccatcagtgctccactcagtcccgctggcatcctaaggttgaggatggctgagcaccctttgccaaccctggccattgctctggctagaggactgcaggggccttacactcccatcgctgcatggcttcagatccttccagaaggtctgcatctgggtgaggtccaccttgttgagagggatggacacctccccaatggggtcattgcggctgaaacggtcgtagtccaggacctggaggtagaggaccctctgcaccactttctcatagggaaaacctgggggaggcagataaacaaggtgataaggattatcacaagaacgagaaaagaaattaggatggagggaagggagatacggagagagggagggaagagaggatgaggaggggaaggaagagaacaggaaggaaggaagagaagaaggaaggagggagggagggaagagaggaatgggggaagggaagaaggaaggccttgtgagtggggctggccgtgtgtcctctgtcagcagtctaggtcagggggccacagctgactgcagcagcgctttctgaagtgccagcaagaactctgtctcatgtgacccaacagatgggggaaacaggctcagctggtttacatgacagtcccaggaccaacaggaagatcaaggccattaatgtgctcattgcttgtgtgtccattttgggtttgggcagtgactcccttgctctctggatcaaatctgggcaactagctctgcctgacctaggaagacaagggatagggaaactagaaaggtgccagtgagaacagaccagctttaggctctgctttctccttcacttcctccccaggcatcacctgtctacctgctcttcctaaacagatcccatgttgggtacccaagccaccggcagctcttgcccaacagccacaagcatgtccaaactgccctccccgctcccaagcttcttcccatggtccattctcaacactgtggccacattgattttttttaaaaatagccagcatgccacagccctctccttttaacatcccagtgcactcaaaaggaaagccagcttaccttggtgactagtcctttcaaagtgtggccccagtgtcttcccactgtgggccggtacccaatcttccctccgggcacaggctccatccctagagactttccccctgatgccgtgaagtcctgcatcaggacctaacttgcaagccccaccgtgcctgctctatccgattcttaacttttacatttaagttctccttcctggcatcacagatgggtgggctgccctgtagcactctccatcactttcctttcttggctgtagggcaagcccaaacagatttatccatctgtttcctccattatcttatggcttgcctgtcaggccaggataggcacttgatattttaagattacacttacgtctgtgcatgtgtgaatgtgtttacatgtgtgtgcatatgctcacgtgacacatgggcatgccttgtgccacagtgtgagtgtggaagtcaggagaacttggcaggaattggttctgtgtttccaccatgtggatcctgagaatcaaacagaggtcattaggcttggcgtcaagcctcttacctgctgagccacttcactggcccagataaatatttgtcaagagagtaaataactggggactggggagatgacccagtgagtaaagcccttgctgcgcaagtgtaagggcctgagtttggatccccagcacccggtgtaaaacctgggtgtggtggtaggtactgcaaccccagcccgggggaaattgggggttgggtggaatcaggtggatccttggaacttgctgtccagctcctccagccaatcggtgagctctggattcactgagaggctctgtctcaaaaaaataaggtggatatgtctggagagatgggtcagcagctgagagcaagttctgttcttgctgagtttttgcttatgtacacaaacacacatcgaatattttctaaagaacggtcaggagctattgactgagtattgtcacttccttccacatgcattcatgcatccatgcacctgtacttgaacacacacacacacacacacacacacacacacacacacacacacatgcacgcatgcacgcacccacgtgcacacaatgagagagaggacagagagaataaataattggatgaatgaagaaatgctagtgagctggcccaatggagtggccagaatgaaaggggaaagggagagaggcaggtctgacctctgtgaggcacaggggacctagggtgggcacaggacagcctggaggtgatgtgagatacagtctctctcacatatggctaaaactcacccaccagaacctgtcttgagtggctggttttgagggatgttttcctctggacaccaaggggagaccatacagggttctcacagaacatgatttaattatctgcacagctttgtcctccatgagactggagtgaccggataactatatcaattcttcattcttttctgaactcccaggatccagctaaaagttggtggtgagcaaatgcttgtgtgagggacttgaggattggggctctgcccctaagtctcaccatgtgctagttatacatgccaccagatgccaagcctctggttgaccgtgccatctctaacctggtgcccatgcctacctggggatgaggggcctagaaacacagaggcacttaccacattgtcaagtcatgaaaagcacaggtgctgatgggcgtggacccagccggggaagcgtccctgggaccagaaggccagggtacttcaaagcaattgtaatcccacaggaaatgattttccctggtggagccaggttaggggcaaagaagtaaggcttcccatagtaggccctgccacctcaggcctgggataggaacagtcccctcactgcccatcccgtgtcctcagacacgagagacaaagaatggctttgtgagcaagggacacattcagctcaatggctcttggagccagagggaatggttctgagatcttgctcacctcccatggtgggaaggggtcaaatgccagcaacagaccatattttcaacaggccaatattggcatcttctggatgtcagggcctgctctagatgctttgaaaagtcactaatttgtttaattatcattattatctctattttatagctgaagacacccaggaccagagaggttaggatattgtttaatgtcacacagctggcaagtgagaaagctgagactccagctcagacagcctagaccaaggggctgatggagatgaagatgaggatgaagggaagagtcccagatggttctggcacttccactagatgcataagggcccttcacatggttgctccagcaacgcacgagctgggatctagtctccctcctcagcctatggctggtacattgacttttctcacctcctgggaccaatctcagctagaagcaaaatgcgttgggtaatccgggcatgtgtgttcatgaaaatagtatgtgcatgcatcttatatgcatgtgtgtgcacctgcctgtgtgtgcttgtacacttgtgcacctgtaggcatgcatttgtttgtttcttgcctgcagccgcacgtgtggatggattcagtgtgtgcgcgtgtggcggggggcaagaggcatgttgggagtggcaccaccctcaccttcaaagaggaaggtctcgttccagtgtgggttcaggttcttccgcttcaccttggtctccagtttgtgcttcttgtcgggtagcaggtagatcttgacgaaggggtcactggtgccactgaaatccttggctggcagctcctgggccttcatgaccttcacggtgagtgtggactcttggaagttgtagccaacgctgaactggatgcggcccaggttttctcggctgcagccctcatgggcctcatcctcctcagagcctggggagagctgtagtgggaaaagatggcaggttgctggggattctgtctccacaaggctcccgggcagcacggcagggtccatgacagcatgacaagctaacttcttgtggtcccagcgtgactggctggggtagtggcctatcatattcatggccagtagaggatgtccaggctctgagagccctgacttaaccagaaagggaggggaacagggccaggatgattctgcatcctggatcccagagctgtgagcaggagacccacattcccacctccccttgaagccacaagtctgctcggctccaagagctaccctgagctgtcctgcccccctctccttttccagccctatggcctcctgggagacatcccaactcttacaaaggaggccctctgggggctgtggatgatgcagtttacaagatggcatttgggagaagatgaaatgcttgccaggctgtccccagggagactgactgaaccaggctagggtccctgggcaccgaagttgtacctccaagctatgcccgttcccagtctccactcctcaggatagaagcttggataggctggacagtggtggatagtcacaaggagggactaggtgctacattttcatctcaatgagggcgtggcagttggggagagcagctgggatttgccagttggggtactgctcactaggaatgatggagggccttgagggtctccactgcctagtcagggccttgctggcctgggtgtctttgagtccacatctcctctggcaatagatgggagtcaagagtaggtcccaggaaactgcagatgggaccaaaaggtaggcacttgccttctccccacactctctcagaaaatggcccctcctgcttcctggagtggcaaccccaccttctcaacaaagaatatcacaggtgacataaggcagacagaggcacctaccatagtgaagacacatcaccttcttactgccggaccaggcagctgtcacccgcctcttgctgaggagactggctcaaagaggttaaatcacacatccaagcttgcatatcagtcaggacactctctgacttcaagcaccactctttctaccaaagcccgcccagaccccaagatacagtaaggccctccccatagccactggaagcaaagacctgcctgcactgagcagagtatccaagttagatcgatgatggcaaatactgcacctaccagtcccctactgtatgccaaccctgcagtatgccacacacttggcatcttttgtgccttcctatatcttaaggcaggctctagtatgttcaaagtttggcaaggagcacagatatattaggccacacacttcaagctcctatgattgactggccagtcagaacttgaaaccaggtttgtggccagcaacggtgggtgcctgactcccgaacttagaccatagtttgaatctgacctctggctccacccagtggccaagggggaattgcaaatgacttttttttttaattaatttttttgtatctctgtgagactggggttcatgtagcccaggctggccactaattctctatgttgaaaagctggccttgaacttctgatccacctgcctctatcacctgacttctgggacatgtgccaccaaacctagtttattaggagctagggaatccaacagtgcaagcactctacgaactgagctacacacctagcccattgctgatgctcctgctcacccccccccccccgcagctgatcttactgcccacaggctctatcccagcctccccaggatgtggctatccatatagagacctccgtccccaatttccctcagcttatagcaaccctcctcttctactgaaggtcactttctgaacctgcaggttggagaacatggaacttgggctgtagggctctcaggagggtgaatgggtgcatggcacaagtaggcagagccagccaagactacctgcacaccaattccctcttatattatgaagtcttaggccaccataggtgtggttccctccactctcggcggaagcctgggctgtcaaggtggactttatttttgaaaggggcagagcctctgtacccaattgcttagctttctcaaggcccagccctgagtcctagtgaacaagccatttccatagcaaccaggctgcctaattttcccctcccctgccccaaacctctgtccagaagtaagccttaaaagacatcaagccagcctgtgccaggtcccatgttccccagtggggatggttatgtccatctctaggtatctgactccttcctggccctcggcttcttcagcttggggtctggagaacaccatgggatgaggtcacaggacatattctatcctgcttatctttttactgtcactgttaatatcaacgacctcgaattggcagagggctgggcaattagacttgctctcccacctccgggcatctgtggagtacatgagagggagaccggcctgtacttccttccgctgcttgagtctgccagcctctccctgagggcagcaaggggccagccagctggctgggaaagggctgccccttctgggaatctgactaccaggaaatagcaccaattaaggggctgtgcaagcaggcagggtggtctgtggtaatgggcttcccagagtagaagatagccagtgaatacaaagttggagataggaactcgtaaagggccaagccaagggaaatgcagacttgggctccacctgaggcctgatgcctggaaacctgaatccttacccaggtgacttgtgtgactctgtgtgcatatccctacttgagacaggtcaagctggcaggaaactgtatgtctgggtggttaggagtggctagaaccctgcctccacaggaagggagccaagaagacctgttatgtccagtagaaagaaagggcgctgggttcacaccacaactctctccaagccttcgaggaacttctggcccactagacccttagctgattcttgtctgctaacttgctatgcctgtccatgggcctccctctggggattaacccagtgtctctctggaaagtacaagtaactgtgacatattgttgccaccagggggtatcatgagaactgtggccccagctttggtcaacaacctagatagggatcataggcctgtcggcaactgggagcaactgagatcagtggtggctatgggacagtcacccctggcagccccactttacatctctactcaagggaatgccattggagggaaggacacctgcctcaaaggccactgctggacagcctctcctcccaggacataaaaatgtctttgtgtttcttaggcttttcctcggcagaaaaggatcaaaggaagacaaaagaggaaactgaagcatggaaaggcattttgatgaaagagcagtgaaaagaaaccaggcctcattcagtccgcaaacactgagcagccgttatgctgggactgagtatctaagtctctgactaagttgcctacttctggtcccccccacagcccttccccagcccttctcaccatgagcatctcgctggtgagggagttgacaaggtcggagacagaagaacggggctccgttctgcggtcagactcatcgtgaggcgtctggccaggcactggggctgtattcacagccttccctcctgcaggcaacctggaggttgggggtgagggggggggaggagagttccaatgagcatggcctgtaggttgggctgggctggactccaggggcctgggtggccacaggatcttctctgagaactcagcccttgtcacctcctgtgggccagcaggagtgaagcccaggtccacagaaagcctggttttccctgaagacctgcactcagggctcatccttcctgagcctctgcctcaggtgactggctgagctgccctgtggagcctgtttaaggggagccttcattcttcctgttacccccctctcaatcccctctcccagtcctctggcttacatggctgtactctgagtgcccctgctctgcagaggcctcctccacccagtctggaaagggggaggcgccaggtggcctgtccaggtgtctctccacgtcattaccctctgcaaacactccacagcctctctctcagagctccacctgtgtttgctcagccttagcagagccaaggtgctcttcaccctgtagccaaggtgaggctgggaccactgtccacatggctctgtctggagtgtctgcttcgacaggcgtgctcttttgctgtctcatgcagtactagccatgtgcttggaatctacatttgccgtgtggccagtgtgaaggagtactgtgtgtgtgttcacatgtgtatgtgtacatgtatgtgcatgtgtgtggaggccttcattgccattcctcaggtgctatttctcttgttttagacatactgtcttattggtctgtggcttgccaaggctggctagccagtgagccccaggaacctgcctgacttcaactccccagcatcgcggttacagacccaccatgctctgcttttcttttactcaaggcctgtgcttgtgtggcaagtcttactgactgagctatcactccaggcctgagcatgaacattttaatctgattaaatacaagctcttttctaggctgaagatgtagctcaatggtaaagtgcttgcttatgcaacattaatcaattaattgttctgtttcaaacacgacacaaaaaactgccacacccattcatcttgaatagccatctttgggctgggcccgtgatgacctcatgtgccccagtccccaccatgctccccactcatacaacatacttggtaagactcttaccccgagtcagagaaagacaggctgccacctagcaggcaaccatggccacacccaatgccatgctggtccagggggctgggatctctgtttaacagccggataatgagcccaggctccattcagctgggacttaggaagggacaactaagagcctgcccagggaccaggctggaatgtctcatgaggaggaagaggtggggacaggcagtgaggaagagatggcatagggtttggggcaggctaaaattaaacagctttgagagcacagagccacataggctggatacaagccacatcccctggcatagaccagcttgaagtacactggcggccacagcaggcagatacagacatgcttggaatatgccaggccctgggggaagacaccaggatccaacagccgggcgtgcacacacagacgcacagacacacacataaaaattcacacaagcccaacagacacctagagcaacagggagaagacggcacagcacagacagtgggcagggcggcaggggcctctgtggtggcacaaacagctggaggcacactcagattccctcaaaggggagacccagccatgcaaaagtgtgcttgtgaattggaacaaaccagaagcaggaaaggcagggacatcaggtcatcaggtacaatatccacctgccatgagaccctggccttgctctgtaacatagcgtgacacgtccacccgcctgcctgccctctccctggacaccctagaggtttgagcacaccagtacacagagtggcaggcacacacgagccccaccctaccccactatcacacacacgcacgtggacatgtgctcacacagacaggcacggggaggaagaggagactgaaatagctggagaggtaaagtcaggttaaaaatagagcaggagaggagagagcgtgagattgactgctgaaggtatgagaaagtcggagttattttggccacaccacagcgtcagcatagctgcaaagcagcctgggaaaagatggtcagcacccctgaagctgtcggaggtcacaggacagagagaggcatagggagaggcagagggagaggccgaggggctggtcactggcccagggacacccctgtgaggagcagatggaggaaggagatagagagaaagagagacagacacacacagagagagagagaggctaagaaaggttagtcagacgtgtggaagaaggctgctgggtggacaaggggacaaggaggagcgtggcggccgacaggagaggcagagaggaggcgggggacacacagaggcggaagaaacatggtggcttcggaggaggcgagcaatgggtgtggcctggtccgctctgccccccactggggtgggggtggggccacggtggaaaccatttggatcccaaggagcaaaggtgaaatgctggaaggatggctgtgagcacgcagtaggtggtgtgggagaatgagtgagacagacacagcaagggtctctacctcccaccccactcctatgctcaagaggtatatgcttaggcccacggcttgggggatcctggaagggagccttcaggggcaccatgaaatgttggatgggttgcaggcagactgtccctcacgttccctgtagcttgctggatacccatattctttgccagggccctgaagtggctttgcctccctgctgtctcacaggactctggggcttaacaggccaagggggctgagcctttcctccagcagcagccaaggcacctggccaaggtgtcagctggggtggagagggcatgcttttgagaaagggacagatgagccagccgatggctgtgaggcccaaaggtcaaagggtaggtccctaaggtgctctggcctggtgcaggcacctatgccaagctgtgggataggggcacctgctagggggaatcagctgagtcagcaggtccttgaagctgcccaccacttggagacaccccaagagctgtgagagatgagtttcaaatatgggagggcatgaacaggcgaggatggcatgtgtctactcggaaagtggggccaggtggggagggcccaaggcgggcctccacctccaaacccacctttcctaggcaggcagaggacaagctgatgtcatgatcagaagggatggctgtactaaaatatgaagacctgagtggcaaggaggtataaataggctgttgggtgaaaatggagctggttaattaacacatgggtgatgtgaaatctcgtttccagcctgcatctgctccctcacgcttcacacctcccccccccaaaccaaccctcccaggcagaggccttgggttcttagcaggctttcagagggctccagccccctgcatcctctagtccctggtcccattcctctcctccaggccctctggcctgcttggagcccatctttgagagcctgtggcttctatcagacccaggcaggtaagggtggcaggctctgctatcactcaatccccacttcacatacatgggctcagggactgacaccagctgtgccaccaagggtaagaacagttctcattctcccctctgactctctacggatgtctgacccactagacatgcaatgtggattcagggtgggaatgaaagagagggctggtctccagaagccaccgtgaaatagccagtcagctgtcacaaacagcctaccctgcttccctaagctacaagccactggcagcagcctggggcagtcccttactgtccttagcagcagcctctaatgagcaccgtggttatcagtctaagcctgatctcggtccagcttacaggatctgacaagtaccctggatcttgggcccatttcctcattagaagctttgtgtgttcaatccttcatttgacagaggcagaggcctagacagggtctctgacttgtctgaggtcacagatgtgaggctctggctacgccaatgctggcccatgggccctaccataggcctttggcctcctgggaagcagaactgagcacaagcagaagtgagtccagccgaaggccaggccaaggtaacaagtaggtaaggactccatcttggggagcgctaataaaccctgcaaccttcaaccctccctttacctatgagcagtgtctacccactcctcgacacagaggacagcaggagatgcttccctgaattccaggtggcgaaggctaggaggtacagctcgtactgcagccacctggctagtgctggtcttcacagggccccgaggaaggcaacagggagcctggcagagccagaccttgcccttgctgtaaacggctggccccactttccatttctggaggttgtgctcaggggccacccttctggttccttctggtcaccaggcctctcccattgtccctcactccagaccctccccaccaggggcacctcttccatggctgagtagcagaacaggccctgcaggccagagggaggttgaggtggtggggatgaggaagaacaggcttatgccattctcccagcattccccctcactcgccaaccaccagagaaacagggatttctgggttgggaaggggggcagagatgaaagatggaggggcagcagagggagtcaagcagggagatggggcccaggaggctgggcttgctccaggccaggacaagcatgctggggagcaggcttgatccagaatggtcccaggatggtcccttcattgacccaagggacaccactgacgtggtcaggggacagaacaccagctggaggacttctcctcccactccagcatctgctgaagacaccaccacctcgtccagcagtcggggccggctgaggcaggtggcctctccgtgcctccttctctgccgctgccgccgccgccgcagacctctcccgtgctcgtacctcttgtccccctgagcgttctggttctgctgggttcctgggttttgcaggtcagggatattggcaaagtcatcctgttccgaaagccctaataccagggatagcaccaccatccggccttccctgcccaggatgggcagcccaccagccggggtgaaaggaggcagccccatggacagggcaagggtgaggggaggagagagacagaaacaaagagagagaagagaaaaagcgtaagaaactggccctggagaaaagaaaccaattttcagaactgtaagtggttggagaactgagggggagcagaggggagagtctagctggccttgggcccagagctgcagtctctggggtaacatgggaaaggtgctaggcacaggcccaaggagaggacttaggtatctgggatagtccccagggaacacataggctggaggatggagcagagaccctgggacacggtatcccagatgcagtcactctgattgtctcttccctgggagagggagaagaggctctctcaatattttgtatagggcatgttcagggaggtttgggacacaggggaagcactgtagaaaaatctgacatccaatggacattgtacactgtgctcagggatgcccttcatagatctcggggtccttgaaaccagctatgcagcttcttctaggcttccagatatacaacccatcataggagaactccaattctgtcccttctgggatcccaggcatagtgggatttctctcttgtccacttccccagagagtcagggatgatcagaggcctgtaggacctgttcagtggaggcctttccatggagaagcagttcagaaggcatcagggagcaaaggtggagagaaagtccagaaacttggcaaggtctgggcatgctttggcagggctgcagggagcctgtgcctgcagtgagatacggctctgagagaaagtggccaaagcagagtggtgggcagataccaacaggatgagagcaacttagagaggatgtgtgggcagcagcacagggtctgaggccacacaccttgagtgtggaggcctcctcagagaaccactgtgtggagttttgctggtgtcataggcacttcctagaaggaaatgcaaattttggtggctgttttccctcaaagccatcaaagactatgagtttacaggggctttgtagagcttgaggggacctttgtagagctcatcaaaacaaagagttgaaggattctcagacagggcaagcatgaaagcatgcctcaagacgggccaaaggaaacacagggagactgacagaatgttccagaaggaggatcttaggtcaggaacctatcacttcaggcactgacggatagcaagagcttctgtgattactccccagggagactgtcaaaatgggaactctggccagacatagcatctggggtgaggtataagggcataagagctgtggaaaatgggaggcaccacaagggtctgagtgaggggaggaggggaggaaggtagacatggaggtgtcctttttctgagtctttgtcctggacacagccacatcaagctgacatttgtgctggtatctgactttgggggctcgactctccccttccctcaggccagatcctggcttcttttgttcctgactattgctaatgtctgagttggtaaaattccatttggttgttcaggagctagttgagctgggagaaggcgaacccaatgaaaacacgtgcttttttttttttttttttttttcagttaatgcatttttcagatactgcttttggtctttaaaactgagctgctcctctgcataaatacccagattgtcattctctgcagcttcgaaggccatgagggcaaggatgaggagcagagctggacttggggaagacaaactggtctggttgggtggggttgcacctagcaagtgggaaggatgcattctccgtgtgaggggagggcaagctcctgcaaggcctggagagccctcacgagcggactctagggcctctgtatttggggtgaaagatcctcagcaacacagcctctacactgcaaggcagggctcagcacacctcagcctatcaatggttctgtgcagtccacaagctaggaacggtttctataacctagaaacactaaggggaaaaaagagagccttatgtgggaaagactgaatgtatcctgcaaagcccaaagtatccggcctttacagacagggtaggcaaccccttattgtgagggatcagtagtagtagatgttctgagcttggaggtggccagcaggtaagagggtatgagagctgctgtgggggcaggagcatgggtaagtgatgctggcaatctgagccatgccccaggatgctggcatctaagtcacacccatcagaattctagtgggttaggaaaatggtgaagcagaagagttgatatctggccccagcctacgcaattgcaggaagacatgaagggggtgggcgtcttcctgttaagggcaggtggggcccagctgaccctcagttttgttcacgccacagcagaactggatttcttgatctcctactccatggccactacacccatcccagaacaatccactgccaagacaggaagccttgctggacatctctggtgcagtacttgattgccttcccagaaggcagttgcacaggcttctctgattttccaggggcagccttgggcagaatggccagtgggtcatggtacaggcctcttgcaaaccaggtgtgggcacctagttctgttggaggtggctcttgcctgagctggaggctctggctgggatctcacatggagatgtaacatgctttgaaaaacttgcttgccttctggaagccctgtatctttccagtgagcttggccttggccttgggcttttcctcttcctcccagtttaatggtgccattctgtacctaagaagtttcccagggaagaccgggctgataggaatgatcccctcatggctggaacaaggcccataggcccacacctctcaactcctagtgtgactatccctgtgagggtaaggtggtgggacatatgtcagggaagcagctatgatcagctgctagctagtatggtgttgcttatccaacctgggtccttgaaagaaataccacacttggcagctttgggggtgtggctcagctttgtcctctggagaggggtcattgatagggcggaggtcagggatggttgggcagggaagtgacaggggggaggatgcttggggcagaaagaacagcagagtctggttacagacaggagggacattggaggaaggactgcagggctctggagatttagtgacagggatgggttggggagaggtggaggaaagggcacagtgaggcaaggctggcatggtgacaggagcagccggggactgattggggggagcagatctcagggacctccagagcacttaattatgtgttctcactgaactttggaggggaaggcttctcttctcaagcctcaaaggcagtgagagagttctagggtcctcagagttctaggggctccagacataagtcacaaaaggctggggaggaggacccctaagcctgccagacacactgtgggaatgtgtgttcccacatgaaggaacatagaacaagagtgtcttgcttcatctgctcccaaggagacttggggctgggggaaaggttgggttggggaggtggggagctggctgctcaaggggaggacttacaggaaggatttcatgtccaagcctcggtttcgaatctgccccaccacgtggtcccagctgcctgggttggagcggctgcggcccccagctgcccggtacttggagccggccgaggtgccctgccgagcctgaccccggccataggcccgggggttggagcccggtgccgaggccgcatgggcctgcagctggcccaggctctggctggtggtgggctggctgggctgccggccccgctggttctggctcagcggctgctgcaggctctgctgccgcatcagtgtgcggggtcgctggcatttcggctctcccgcggagctggggatagactcaagggtagtggccgtggacagggtggagtcctcgaaacttggggcaggtggaggagaggagagaaaggagaagcaggtgaagggatcacagtggaagagaaagaagccgagggccagggctgggaggccccagtgcagggcacgctcggctggacctcgccaggcctccatcggagttgtcactgctgcggtcgctgccaccacctaacccaccctgaggtccccaggctggccccacccacccacccacctctggacttggctgctggttccccagtacctctgtctggaccaacctctttgcaggtctgagtgggccgcaagagctgtggcagttgcgtggtgaaggcaggtccccagggccctatgactgactgcctatcatgttggagtgggagggacagagagctgctaccactcccctgccatctcactaggggaatactagtaacatctgcctctgtgttctaggtactactgtcccgagacagaaagaaatccaggccagcacagagctggcctaataatggctggggaggcagggcagccattcttgaagcctcaaaggagaggaggagagaaggcagactcacagggaagcctgcctggtggccagcgcagccttggggttcagttctgcggcagatctctgacttcttcctagggtatcttgccctgccacctaggcaatgattcacactcagatgtgggggccaacagaagagcagacaggagtgggggggtcccaggagccactgctttttcacatagaagaggatgtctgtgcaatagcccatcagcatctctaaatgcgcttggcgaggcagggcaaggacagacaagaaaacaaggtctggctgtgagaggtggtgtagagccagagacctgggttcaaagctcacttctgccacttactaactgggcaactttagatgaggttttatacctctttgggccttatcttctcaactgtagatggagggtacaaaacagcccttcagtggccttctctggagctgaggtcagggctgtaccccactaactgctaccatgtcagggctcggggacaggagtttgtgttttgacttaaggttttgtgtttctgcctgttttgtgctctggccaaagatttaacaattcccatgacaggactggaggcaaactgtcactcaaggatcagggagtcaaactagacactgctgaacaattccaagttccttatccctgagtctgaggttacagcctcctttttctttcctgatccagctgtctgggactagggttggtgaactaggacctataagctgaatctgggcccaatgcctgtttttataaataaagttttactggaacccagctgctggcatttgtttacattccacttgaggctgagcagcatgaaagatgtggccttggcttgcaaagcctaagtatttcccagctgtcatttggcccttaactgagatagctggtctacccctgctctagggccatgggataaccaagtatatcttgggagtagcagaaggaggccccagggcccttgggagccacgttcaccacagcagccagacctcagccatgctcacccctgaacttactctgggaaccaaaagacaatagttaggtggcccctgtgggctgggtaaatagagaggagagagagagagagagagagagagagagagagagagagagagagaggacagaatgaaagaagaaagcaaaacatggctgtaactgggggtctaggcaggcagcagcctggcctgacatgggctgggaatcagggctctccccagggcaggcctaggtctgttcagccttggtaggcccacagctcaatgggggcaggccagctgggggaggggtgcacaccatcttctctgtttccttgccggcctcatttctgtttcctatcacatccaaaattagttcaatttacaacctttcagtcacaggaaactaaaactggatcttccaggcctgaagccagtgagcaaatgccaaggaagtccagtcaaccctgagcctggctggggtagcctgggggggagaaggggatgtggctctcggatggtgtgtgaggcatccatctctagggacattcctgagaccatacaccaggagggaatggacttgtgtccactcaaagcaatgagcaaatgtggcctcagcctagtagcctctgtggtttgatgtgtgtgtgtgtgtgtgtgtgtgtgtggggggtgtcttctgaagagagtcaggaaggccttgacttgagccgaatatcccaacactaagaaggatcaatcaaggctgctggccttctaaggggaggctccttcatgactggaaatgagacaatgttagcagctcaaagtggaacccactttcaaatttgtgaggtgctcatagttcagaggacttgggaattggaagggctctattgtgggagactggaagttctgaaagcgaagaggagaataagtcagccttagtggaaagacagatgctgtgtcaaccatccacaactgctcggcaagcccagaaagccattaaaaagggacaggctcttctgactaccctctgacatttgaaaggagctgcttactgggggttcaacaatctcaaccctcaagatttcctatcagtgggatagctcactgaccaagacagggccagccagtggggatggctgcaatgagatgaacatttgtggcagcctggtggctgctcatagatgaaaccctgtggcagatggtgtcatggtacaagcaagggctgggacaagcagatgaaatcattcaaaatggaatggctcaaagtggggtctagagccatcagctggccaaaagagggaaggcccactggctgatgagtgataaaaatacagtcagagacagtgggataaccaagggcctgctgcccacggagggatgacctgatggctgagatggggtggccagtcaaagaggatgggatggcccaaggactggagtgaagctgctctggggacagagaatggaatgacctggtcactggcaaaggaagacattaatgggaggctgccagaggcctgaatgtgagagcatatggctgagttggttgtgcctgatggcgaggacgatgaaagagtcttgtgaagggatggaatgaaccaggggccgaggacggcacctctgggggcagcagcgggcatgccaggggtcccgctgtccaccctggtgggggcaggcctgagctcatggctctggcagccatggggtgccatcactcacttggacaagttgagcttccctgcggccaggtggctctgcaccatccgccagcggcctctccccgccttgccactgctgcccggctcgttgggggcagccccgccgcttctcaaggcgtcctctccgggtggtggcaccggcgccggcttctcccccagccggccttcccgctccaccgccagccccgccgccgcagtggctactttggcgcctgacaggagggtgccactggaggcgtgtaggaggcagccaggccagaggagcaccgggggtggcggtgggggagagagggcgggccacacgtgggggtgggaggggggaagaagaggaaaaacatcgacagataaaaggaagaaagagacagtgagagaggaggagagaaacagacggacaagagacagacagagagaaagagagacatcagcactgcaaatgggttaacagtggagcctgcagaggagagaggggaccgggcgggctggggtcagagaacaacgcaccacgacaatggaggggggcccctccccaccgcctagggcaggagcggtgggggttgggggagggcagccacctccaactctatcccacaggacaacgaagggttaacgacggaggaagagcgggctgtccaggccaggaggcccccaggcagggagagagagaaagccgtgttagtcagagttcatcaccaccaccaccaccatcaccgccaccaccgccacgaaccaccgaccaccgaccaccgaccaccagcagccacggccgcagcacacagcggggaggaaaaagcgagccacaaccgagagggagggaccaaaacgggcaaccccatcctgactgcacagagggtggggagccagggggcgtagctggggaccaggtgtggctgcggagggggctctcctgcatggctggccctgggagaggtgacaggagagggacaggcaggcgaggggggcaggaggggttgctcgtctccatggccagcctgcccatggggtgaatggaggggaaagtggagggagaggagcaggagaggaagtggggggaggggcaggagaaggggagggtagggcgtgcgcggatactcagtacatatgatcaaaccaggtaaagtcactcacttgagggacagtcgagggtcgccataaggggcgtagggtgaaatgtttagaataaactccttgggaggataggaactccatttctgctgcactgtgctttcattgttattccaaaagtctctgtctaggtcgctggaggggcagagagagaggggagaaaacaggaagatacaagaagagaccagaacagcaagtcctgcaggggcagaagggaccagaagggacgcgggggcccctggggccacacagagggtagggcctcgagggtctgctcctgcagaggaagaaaggcaggagggtggatgggcactgcagcctgggccaggtatccttgcgctcacacatccatttggtgcacacattcatacaaacacacgtgcactggaaggctggccgggggaagccgcacaggaaggagacaagctgcaggcaggtagacgggagagcctcgtgcctaggaagctggtgggagagagaaagaccatgagagaggagggctttaggatggggatggggtgggagaaaggcctggatgagcaaggggtactctgggagaaggggaaggcgctagtttaatgttagaaggtgttggaaagtaggataaatcctgctcctggtagctggccctctctctctctggcctcagtttctcatcaaaggagaaaactggcttttctccctcttccatcttctctccagtggcctaacatgttccctggcctcctcctctggtgaggctggaatgcaggatttccatgagactgggtgagcagaaggcttcacttgagaaaatggggtgattgaattggttgggtgaggcttccagataaaggaggtagcctggtctctgacgccagggaggctatcaccagaggtcatcaagaccctttgttctggggactatgtggagggagtttgctcttctgtcagttgggccaataggaccttcccagccttgagcccacagtagaaacttggcctggccaactgggaaggtttcttgtgctcctgtccctaaggtggagctgctggatttagaagggaccctcaccctagtccatcatccctccatctgggtgacttggcctcagctgactggctaacagcataaaggacatcggaatttctgtgtagggatataggatagagtaggcagcagaatcctgggctcctgtagtttatggcctggaggtttcagaaactatagacagcttgttagcttcctgggctcccagagcaacagggactggtgctggggtgggggggggcaggggtagctctcaggccactgaaccattctagaagggatccaagcatggatgacaagaacgctgttagagtaagggtctaggggaagagtctggcctgtgtccatgcttgggtgaggtgaagcgtggatagggggccagcatcatgggggcattctcccctaagaatcaactgttctcaggggagctgcttctcatgtccctgagagttagatcttgaccttggtgcttcatctgagactcaggaatggagaaaaaaaaaaaaaagagatgagaagctgggctgtcactatgggcctagaggagatggtggccttggctatccctaaagatagtcacttattgtctaaatacactttggaagtgtctcacaggggaatctatgcacaaagtccaagcccaagccccgagccagctcacagagacagggggaacagtgtaggaaagggaggcaggatagtctccagtagaaaattctctctctacgaaagatctcatgcccatgaaagatactcctttggctccactccccagcaagaccttgcttggatggagactccccacatcaggtgataaaggaatgtagcaggttggcagtctccctcctcatgccccctccatgtctccatccaatctaggtcctagagggaaaagatcccctcagcatcattgccaggctgttccccgaccctgagttctggggctacttggatttctaccatggtactggaaaaaaaacgatccctcataaaagaaggctggagaaactggttcctttacagcataacttgtcggtcataatgtgtcagcggccatcagtatcgccaaaagggagatggagtgtgcattgtttcccagacttggttggctgtgaaatcctggatgtgttcattatttctgaggcacaggcgctccaaggaagagtttgggaagcgctgctgaagaatgcagtatcccagaacccttgacaacatgattcctttggaggaggtcctaagccagtggggagttgtgcagtaaataaattgcccaggacagggaatacaggaacacagacataagtagcggcttctatgtcaggggcagagggtctggcagcacatcaggtggcagcaactcaggctgtggacagaggctcactctgccctcactgtgccttagagagtcctctggaccctggctgtagactgcttccttccctgacgccctcctttccccttgttggctagaggagggtgctttctagaatgccttccctgtcatgagcacctgtcttcactcagggcttcaaatagcccagactagctcatgggatcttcctcaaccccaaccttcagaaagctcagagcctgtgctctgcaacagcccccaagtcccaccagctcctgtctttgaagacagagagcatgcaaccaaactcggcttcaaagactccccgtggtctccttctgagccttccacccatccaagccctagttgccccacccttctattcatcccccacctcagacaaaccccctcacaacttctatgaaatccccaaacaaggtcagaacaggagatttacaaaaagagaaggggcagggagggagccttcaggaataagggagcaaggggaagaatgagtaaagcaggagggcaagggtgtgcaggggtgcaggggaagagacagtgaaagtggagggccttgaattgacaggggaggggtatgggtagggctgggctcagcttccaggcaaagccccttggccagcaggcatgatcccatccagatgggctggtcagaactccctatgaaggcctgctctctatggagagcaaggtagggaaagctctgttctcagagcctgagccctaggtgggcaggggttctgtattgtctcctagtgactctcagcagagggctggccaaggtggtcttggtctatggactaggctcttagatctcagtgggcaaccctaggcagggtataatccataggacctgaagtgggacaagatgcattaggaggacagagcctctccccatgggcctcattcccaggactcagcactgacgttagctggggtcctcatgacttgtctgccatcctttccaggttgccctgggaacatgtgtggagtgtgagaaaagaaactcagactatgaggaggggattccaagcctataagtagggtcttgggtggagattgaagggtccagggacctgccaggggggtggggactctgtgtatgacattaagagctggatggaagaatcagcgtagcacacatagggctgtaggtgagaggcagccttaagaaggctgcagtctccaaaatctcagcatctggggcataagaggaaaaagagggccttgggattatccagggttctgagaccaaggaggtgggcatgagcatgggcctcagggggtgagggacatattagatatgtgtgtggccaggtctgaggaatgggagaaggagcttctcccatttgggctatctgtgtacccccccaaactggcagcctggcacctacttgatggctttcttctcactgcgcccacgccccgagtctggcgtgcccaccgtctccaaggagttcttgtagcgtttgccctgtggagacagtatcagggttacttcttgggtgaagatctggacattccctgtctctccagaataggggctccagaggaaaggagagagagactagaatttagattatcaacaaagtccagagtcagtgtgagggattgttgtcattgtggggtagctgtcccagagccaggcaccttgtgggctctaggacctgcctctgcctacaagcaatccttcatgcctgaccctcaggtatcaggccatgccgtctgcctgtctcctgcgcctctggcccagctcccagaaacacagttccctctgctgtggacagacggctctcaggcgcctggccacgtcacaatgtccacgtcaccacccccagatggtgggggtggcatcctgcagggcaaggttggcagtggccaatgacgtcagtggtgggggcggggagcaggccacgtgcctgagcctgccagtattggtcactgcttgggggatcgctggggtcttcatgtcctagggctaggaggaagggacaaggtctctgtgagagataatcatgggaaaagagagtacatcctgaccctgggggctccaaggttgcttggcccctggacagcccccagagttgcttagcccagtgtgaagagagaagaagcaggtcagggatgggcatcctgggtccacagtgcaaggaagaacagcaacgaccaggcctgctgccgggaaggtgagcaccattcaccttctcagtttgggtttctaaatttagctcatgcagagcccggccccattaacattcctggctgccaccaagcatcctcacgaacaccccacgggcctcaggcctgggccaggcaccaggttggtgcaggcagtttgagaacacaggctggacaggggccaggtctgccctgcagacccctctaccactgggtactaatgggccctgaactagctgagtggggacagacaaatgcagacacacaagtgttgcaagcatgcacgtgtatgcttcaacattccctcacgtgcaccaacaccgtagccataacagacaattattccatccttccaaacacagaataaaagctgccacggccgtgttctcacatgccctgccagctgcagccccttcctggccacaggaatctggggaaactgcagcaaaactcctgggaatatgtggagtgcagagccctccctccattttacatgcagcacctttattaactcagggcaccttgatgtggctctggcagagccaccagtgccctatgtcaccctggccagcccttccaccctctctgacctctctatcccccctaccggaatagtttgatgttaccacgtgggtccactggagaaggggctcccggtaccagaccgcattgctttctctgtttatttgtgtcagttcctatatcctgacacaaagccaaacaaagccacacaaaggcaaggcttttcactctctagcacctagagtggcacctggcacctacgggtagttcagaatatcaactagaatgccgtcctatttccccacccacacaggggcttgggcctcaagctgtttccctgagttcaaatcttcaaactcaaatgcagagatgctaggcccttcgggtccacagagccaccctccctcacactgctatggtctctctcatcattcgtttcttagaggttcaaatcccaaacaattccaaacattgacagagaccatcagggtggggccatgcagtggtcaccaagggctattttcagaaggaccttaggcaggagacagagtcccactattcctcaagatctgggcagtacagggcccttctgatggtaaccttggaactccatcaccttttcttctttctttcaggtatttgcaggagagcttgccttggctccaaggatgctcagctgacccttcctcaaggccaggcagggctggggttggtgatcttgatggcccagagcatttgggggagattctgactgccgcccacctgtgcagctcagagaacttttcctgttggctgtagtgactaactctgcagcaggagccagggtactatgtgggacaggacccagggcaggagtgggctggggcactgaggatttcaaaggacaactcaaattaacagaaaacctagatgaggtcccaatgatactgggtggcttgagaggaacccagtgtcactagcctgcttgtcagggaggggacttgccaggatgatctggaaaagccagctgaagattatggaagttattaatgtttgggaatgggatctgagctgtcaaggtattgtgtcactgggactgagggcacaggaaggcaaggagagcccagccactgctgtctgtgaggacagcgttttaaggtcccttataaagaccaaggaagtagcctgggtaaaaagggtctgtcctgtcatctggaatccatggtgccaggagcttagggtggtacacgctgagaaagctatgttctatgaagcacaagtcccaggagacagactgtggtctggaacccggggaaggttcctagctggaggctagggtgtggttgggccagcgagattgctggttcagaacctctcaaatggccaaggtactctaaagtccccaactacaaacaaacctgtctcatactctattaccatcagagatgagtgctggtggaatgaggccatttgtactctggtcttggaaagggtgtcttcacacacacacacacacacacacacacacacacacactgggtggcacagtgcatatgcagggaagactagaacatggggcagacctcagttacacagggatctgagaaaatgatacacataccactgctcagcagtattacacatacacagacacagatggtcaccagctcatgcaaccttcttcctctgccttcaaacacaggcaggcaggaacaatctaactggtcctacaaggagacaaggcacacaccaagagcagccacttccatggtctcagaagcactggtactcggggcatgaagcccagctccctccagtaccttccttgaaataagatgggccaaggaacaatggaggatagcaagctcacactcctgcccacagcaggggacagatgacactcacacagggagctgaactttcggttcttccccaggggtgggagctgcctatcaataccccagggtggagagactcatctagttttgtttttttgtttttttttaaatgccttcttgaaggaggcatgctgggttatcagcttttaggttctccccatagattcctcaccagacctcaaactctttccaaaggtgcttgccccttctcttcctacaagggagtggggcgtgcagcctgaatccacccagggtctatgactcagctttttactcctatccttatggtccctctgtgtatggtgccccaatcatcccattctgaacgggggtgggggccatgaggggtggaggggtgcctgatccctgcctgcacctgggacagctctgaacctctattgagatcattccctgtagccctcacaagtcccactgcgctaatgggcaggatgggaggtaggactcaggctgaagggcccagaaagggggtcctgagggaacagcagcacttgcctagctgcagagtgctggaggaacgggaggctcacacctctccctcccggcgccttagggtgatgaatgtccctcctgacagtctcgttacttattgatagcctaatcccgctcgttaattccccagccctcgttaaaaatgaaaagaagccgtttgtgcttgtacaaaccaggagaatcaggatggatgtgcagacggctgggggtggggcggggcgggcggcaccttctcattggtcagaaggctgtggattagccacgccccttggggggcgtggggagggaaagggtggtgcgactagcggggattccgagggcctcaattctcagtctgtgcgtgtgtgtgtctgaagttctttatgcgtgaggtggtgcatgtgagcgcacccgcccgcccgtgtagtgatctatgtgtgtccccatgagtgtgcctctgggtgtaaaaagatgtataggaccaagacccaagcaaaagtgtgtgtgtaagcttgtggtgtgaagttgtatgcacttgtccctgactgtcggcagacaggtcatctgcctaggcagagaattagaggccagcgaaagcaggatggcagggtgcaaggtcaggcccagccccaaaggttctccccacaagagcctcaccagtttgcgctgacaccagtggcacaggccgcagaggacgatagtgacgctaaggctgacggtgatgatggcagagaccagtaggacatcgcgggtgggtgcccctaaggaggacacacacagtcagatcattatggaccagggctactctccatcccagagcccccagaacaagcacacctccccttctttctggcactttccactaccagctcggctttttctgcctgaatctgggaagttccccctgctatctcagcttcttcatcaggacaaacagaagaaacatgctgcttagacactgccgttctctaaacagtatccctttcaaagggagaggacacatcgatgctctgtaggtccatcaatgattctagaagagacacagcttctgtgtggccttcaggtacctccacatgccacacccaattctgaacagtaaatgagcccaaaggcctcctgccttctgagcacctttagactcccttaagggcttggccaagactcaaagtgaatgtgtaatcaaaggggaatctctgggattttctgcccacattaactcaacttggcttgtgctggaagccctcttctgtcagctccatcctaagccccttggcttgcttccagtcttctcatccctgttggctccagactcctcagcattatttgtaaggtcccagaagctcacaagagtcacctgaagcttccaccttaaggatcctgcgatctcatatttgaggggtggagccccaccgtgggaggaaaaccccaggtttcctaactctgtggcccaggataagccatatgagcactcagttttctcctctggaaatgcagatttaacagcttcccctgtcttcctcacaggggattgtaaacattagcccaaaacaaatgtacagactgcaaaacctgggccaaacatgaccatgtgggggacagagcggaggaaaagcaacaaagagcacacatgagctctaaatatgtgtgcattgggatgtgtcctaaatcaagaagatgcagtttatttacagaggagcctgcatgggtttttcggtgccagtgattgtggtaattaagagttgacggtatctgtctggacctggttcctgtggttttagcttctgcttctcctctcctctgggtctcttctgcatagatgtctcctagaggagagctgggtgggtcattctcagctctcagggctcctgactcagtgcccaccactgtggcaccccaaggagtctatttactaccctttctttctccaaggctgtttgggccaaaccaacttcctaaacctcccagcctaccacctgccaaccaactgctcactcctaatcacaggaaacccctgggcccaattcctgtcagctttatgtgcaacaacgatgagctctgatctggtcctgccctatggccatggagaagcccttgatgtctgggacatcagtgtcaacaatgtaatagagttgacccttcctaactcagactatgagccaggagttccaggtatttcacctacaaggacaacttcatcctcatgacaacaaatgagataaggattataagttggtttagttttgcagataggggaactgaggcttaaggggctcagacatcacgttcagtcactcagcaagtggatgagaactgaggcagacagtccaggcagtctgtctcagggtttgcactccttgccttggatattggttgctggttctcaaagtgtactctttggaacacctaaggttccctggactcccttgatggcttcagaggtagattctgagtagagaaggctgaagccctcttcaatcaaatcagcatcatttcccttggctttacatcttgggtttttgaagaaaattacatttgaagaaggagatactgagcaaagttgaatccttctggaatgatggctctagggtctcctgcagtgtggatgctattatctttcaaggagctgactcctccccctcaagatccctcagccccctcagcatcctttgcacagcccttgaaggcagggtgaaacaaatgcttgccattacaaattgcactgatgttgggaataaaagtgacaagatgtccttggccagcatgccctcaagtgctgttaccatcaaggggcacaaacgtgttctcgcctgccagccagaaggaaccattcctggaggctggagtcactgtgtccctgagctgcaagggaccttggaagtcacagagtcaagcccatgaaccatgatcccctctggacagccctggtgttgacagggagctgttcctgcaggaggctggctctcccgcagataccattgaggaggctgctgtagcttgtgtccaatctgtctccctggaactcacagttgcggtcctcagcctgccctggggcagttctgccacatgacaggcctctgaatccctgccgacagttctcatgtccccttcaagtcttctccaggcaaagctgcccagctcttctatcccttcctcagatgacatgcatggtttcaagtccccttatcatcagcacattaacatttgaagaaaggaaacgttgcggccctagtcagcctttgcccagggcggagttccatgacctctccttggacagagaagacatcctgggtccccaggggtgagacacagacaagggcagacagatgacattgggagatctgggaggcagggcaaaccaggagctaagcagaaccagccttctgggccaattgtagggggtgttcagggagggagggaggggtgagctcagacacactgctgcccctctgcccaggcctgtgctgggcaagtcaccacatgaccaaactgagtcctatcgtcctgcccataccaccatcaagcaaacctcaaagaaaggagaaccaaggaggtgtctcctttctgaagggagcccaattgcctgtgctccatgggggcaaagatcagttccttagctaaaactattccatcatggaaaatggaacctggtatatagtaggtgatcaataaatacttgttggaagaatgaatgagaaagactcccaggcctctgggagtaagaatagccctgggaatctgccatttattaagcacccactgtgtaccacacttcaggacccgtgaagacaggctgtcaatccttcactcactccagtatccttggtgacacacaaagacgtgctcagtaaatatttgttgaatgttcaatgcctgcatatgttatctcatttgtcacccaaacaagatagaagggaagagatgggagaggcgttaatgacagtctccgagccccccccctctcacacacacacacacatgcacatacattctgaaccaggaccctgtttattctttgcccccacaaacccttgagttgacaagaccctgatgaaaacacctccatgaagccttccttaatctgcccaatgagaatcgatcaatgtcttctgctgcagcattcccattgcactctacctgtcttttagagtgtaatgtttaagtattgtggctctagaaccagacttctgggctcaaattatggctcagactctttcaagccatgtgacttaatccctacatgccttggtttctctacctgtaagcaaggactaataatagcacagttttcctgggactactgggagactaacaggaattagcacatataatgtgcttagcacagtgcctgacacagagtaagcaataaatgctagctattatcatagcattactgcattgttccctggaccagagatatctgggtcagggagctgggctcactgagaagtgaacgaaacactgaactggtccactctcattctccccaggacagcagaggccaagggtcacattttattgggttctgtgcatgcttacccacccccatcccaggaagtggccctctagaagctggattatggcaggcatcggtgagtgcttctggcatggaagaggaagggctgggacatgggggtgtgaggtaggggcaacagctggaagccaggctgggcctcaggtgtgaactgtagacccggtgcaggttggtaaggctttgcttccattgcctctcatctcctcagcaagccatgatttatggatgaacagaatcaaacaggaccgcgggcggctgggtgccctggggaagctgcttgagaagcaatggacttctgagggcaagctcactggctgcctggctgggggagggtaggtatatgcacaaagaacacagatacagtcaccacaaccttgtcacgtacatgtaacatggagactcattcctaatacagatattcatgcacacacacacacacacacacacacacacacacacacacacacacacatgcatgcagggccatgagcagatgtccggtccactctatcactcatgaggcctgggctttcagatgcttctctggcttcgaactcccgctcctgagttggatatcatttgcccactcacatgtcacctcctctttcctttccaggtggagcagagtagggccagtaggcttctagtaggttcatgccctgggttcaagccccagccacatggtcatctgcatagcccaagcaagggctggagtgggtctccattctcttccttccatcccctggtgtagtgctgtcaggactaaatgatagccaacattcactggggacgcctagtgtggcagatgtgactgacaccagatagtttctgcataccacctcaagaaccttgggctatttagtattcccccactgacagaggaagaagcaaggtctggagaactaaaggcccttgagcctgtgttttcccaccaggctacactggtctccctctgggtggaatgatgtcccaaggcatgctctacagtactgcctagccacacccattccactccttcccacaagcacccaggccagtcatttcatgcctagaaggctttgcatgatgtcttagttaggtttccattgctgtgataaagaccatgactaaaggcaacttggggaggaaaagatttatttcatcttacgctttcactccatcagtgcaaaatcagggcgagaactcaagcagggcaggaaactggaggcagaaactgaagcataagccatggaggaacgcacttacaggcttactcctcctggcttgctcagtttttttttttttttttttaatacaccaaggaccatctgaccaggggtggtaccacccacagtggactgggcccttacacatcattcattaatcgagaaaatgctctattgacttgcctacaggcaatctggatggaggtattttctcaagtaagattacctcttcctagataggtctaagtttgtttgtgtcaagttgactggatggctgttccttacagtcttttcttcaaggcacttgactgaggtcggtcttcatttccttccataagcctttatatgtactggaactatgacagctcactaattgggattcagaactagctctttatattctttctatgttggatcacctggagggctgagaccctagatccatggcttctacagccaaacttccatagagaggctgcggaggtaattgctaaataaatgcatgaaatcatccagttccaggaaagcccacttccttcaggaagccctctctgaggacacagcagtgacttcttcctccaaagcttaaattaactgaacttctgtctcattcccttttcttgggcatagatcagtcacctcaacaagggccactagggtaatgtcttgtcttcctgactcatgtaacccaggtcatattatagggggccaccagagatctatacacaggctctttaatatttgtactcatggatggtgacatggatactgcctatgcctactacttcccatcactctcaacctggactgtccctttcctggaggctccttctagcatctccagcttgtatgccattggtctccttaccaagtacttttagccatagtcattgatagcaccacggcaggttcatagctctcggcacttctttggaagtacatctattatgggggttgggggaggtgagacagggtcttactatgtagccctggctatgctagaactcaatctggagaccaggctgccctcgaattcacagagatcacctgcttctgcctcctgagtgttgggactacaggtgtgaggccaccacatacaaatgaaagtaagtctctcatgcccattttacaatgaaggaaaccgagggtcagaggattcagagccttcccaggagcatagagcaagagagaggtaaaaccaggatgggacttgaggtcttcaggtcctatgtcccatggctctcctctgttctactctagggacactgtgtcttaaatcactcaatggctagagggaaaagaaagagactgagtgaaccctagataaagaagtcagtgaaaaggcttgtcctagctagttttcttcctttcccttattttctttctttctttctttcttccttcctttctttcctttctttcttttgtcaacttgatatagctagtgtcatttaagaagagagaacctccatgagaagcaagccagtaagcagtgtcccaccatgacttctacccccaggttcttgtcttgagttcctgccctgacttctgtcagtgataaactgtgatatggaactgtgagataaaataaaccctttcctccccaggttggtcttggtcatggtattttatcacaacaatagaaaccctaactaatacatggctctttttcaagaactgcccagatggagccagggttgagtttccccagtattacagacactcctttggcatatgttgcctagggatttcctcccagatgccagcctgatgcaccttcagttgatagaggctcagctgcttaagagtcccagaagaagctgggggcaggtgctggatgggctaactgggagaacagagtaatcagaagatgtgcccagggctccagcatcgatactggttagggtacagccgtattacacacacacacacacacacacacacacacacacacacacacacacactgaagaggaggagtgctgctattgggggtggttgggtctacatcagccagcaccttcccatcctgagcctgcctcctcccacctgattctgcactacacagcacttccctcagcccccaggatgacgttccaggtggaaggtagtgaaagttggagtcatggctttccataagaagcccccccatgcatgccacgcatatggaaatgggggagggcatttacaagtggacagagcctgccggcttggggtaggtaatgtggacatgggaaaggttcgtttgtggtgcttatatcacctcactgctttctccagcccagcacacaccagaaagccaggaagcgatgggaaagaaagagagaaccactaagccaaaccccgaagcccaaacaagcaggcagagctctgctgcttggcattcagtagaattttctgtcctctcttcactctgaaactcctccttccaggccacccaccttggagcctggcagctctctccttgcaagggaaagagaaaatgagatgggtgggagaggagaaaaggaaaaaggagggaagtgagcccagcacacctttcaaaggaaagctgggtcttggccctctcccatgccctctggacattgtctctggatgtccttcagaaagcagaggaggagcccacagtaccttgggcctcacctggggcaagaacaagaggaggcccgaggggaagtgttttggaaagttacaagtagctgaaaataggggcttaacacaagcaagcttcctcaaccttgactgtaataaaaacagataatgtgtgagtgagccagggagagcatgctggcaagggccgcagaggccggctgcatgcagacagtttagaattcagaggagatgccaagtgagtaaacatcgaatgaaggattatcctgatgggccaggagccggtccagcaagaattggatatggacatgtcaggatccacaagcactcagactcctcatcaggggtgaggcctggccagctaccgggtcttatccacgcctttcctatttctgctctctcttccagtagacatcatcacggcctagggaataaatggctcacatttgtactgcgaggaacagtttgtgaaatgctgggcagtttactgaaggtttcacatccattatcacacttaatggaggtcatgagggcatcttctgtccagttacctcctccccacaccacagccaccctcacctcctggcctgggatgggactgctttgagtgctggtcctcagcctcaaaaggaggggagacaggctatctgcagactacaaagatctactgaggccagaagtcatcaggatcaaggcctttcaggactgacaggttcaagtgtcagctctgtgcaggatatctagccaagttatccaggagcctgctgttctccctgcccaccttgtgcccaaagctgatgagctgcctgggtagccatgaaaatgatcacatccatcagagcagcaggaacccaagaaaggaggagctcatacgaagggcctctcccgcaggagtgtggagcgggggcaggatcagggatgtgtgatgattaagtacaagccttgaccactagttactcctatgaataatgcattgttgtgccttggcctaaatcagcatcttattgttattaataatacacggcagcacagaggctagggttggaacgttgcgctgtatctcattggaggatctcagagcactgcacaattcctcacactggtgactcaactccacctccccaggctacaggcttacttatgggccaggaagggcacctgtccttctctgacttcctcccacctgaggcttggagtcacaaaggccacatgagtgaggactcatccatcctgaatttcaagtactcagccagggttctgggcgggggaggggagtacacttaatctttgccagctcaagggctcttgaagatgtaagattatgtgaagcagcttcctgagatgtttaagaaggtaagaggtaactagagagggactccagatgtgggcaagaaggatctgaatccagtcctaccactcatcagttgtgtgaccttgggatactcactcctctctccgttctcagccttgtcgctagagcttagggtgttcctcctttgtgtgctgtttcgctgtaagatatctgtcacagggttagtgattaggaggtctgagccactgagcccttcagtgctgcccgtggtactgaaacagatgtaggcctggttttccctgtccttggtgctgaacagtcagtcctcagtcccaggacagtggcctcctcattgttcctatagagcaagactaaagagactggaacctcctcacaataatagcgcagcacctctattgtcctctgactgtcccttcccgaacaaaccccagctgaagccactagaagacctccagagctctttttagatggtgaggtcccagcgagtcacaagtctctctgctaaataccacacccgcttccctctaggcagtctgccacactgcctcctagtggcagtcttggagctgcacccagagcaggagcacagaaggtccccagtggtggtgcagggtgcctgcgcagggaaggagcggcagaaggcctggcccccgccgccccctcactgctcctagggcaatctggcactctgagcttgcatcattgcccaacacatgcacgctccaactcgtccttccttgtcctagcctagttgggcgccttgctgcttgggtcacagtgcagactgaacacagatgaccagagtgcaccaagccaaacctccaggtggtgggcggtgttgacttgatgaccaccaacctttcctcccattgctaggctagaaaactcccataatttgcttccctcagggcagaagttccattcctccacagccaccttttcatagcccttccctagaaaaaagtgaggagcttggggaggagatcatacctacgagaccttcctattctacaggtgcttggtgattctacagatctctgttagcttggctggctgaagaaactccccaccctgaatcacacaaaacaaaaagcaggaatcaggggctagcgacggggctcagctagtagtgcttgcctaatccacaccaggtcccaggtttgattcccagcacgtcataagatgggaattatggtgcacacctgtaattccacattcaggacgtggaggcaggcagatcaggaggccaatttgggatgcctaaaaccccacctcagaacaaacaaacaaagcaaagcagataaaatcacaataaagacaacactgaaccacagattctctgaattcagggaaggagcagagctaatttactttaattacagtacagccatctagtaccattcattgaacacttgttatgcactaagcgccatgctaagagctctgcaaacatcatatcctttagccttacaaacacccatcagaggaagcgtcatgtttagcctcttacaaatgaagagagtggggtcagagagcaagggtgagcacgcagaacgatggagctggtggacatggagactggtgtgagaaaccttatctttccacccttaaactccaactatcatccagtgttccagaagcctcaccatccctcagatatctgcaagaccattctctccctccaccaccctcacctctcggctgagagccacgtggatgagacagtaacaccttgcactcagcagtacatgtagccttactaagtgttatagccactgactgaactgagccccgtgatactgagggggtgagggcaagcaggaatgacctggctctgacctcacaggagtcaacgtaagactcggaggaataaatggcttgccctaagtcgcattttgatcagaactcaactgtaggtggtgggcctgccagtctggtgcttatttcccacttgctgcaggctggggtcctgggtacacagggctggaaaatccttgggactacgaggctttgtgaggccctgacctgagccgctttccttcttcctgctccctagaggccaccagctgcctcagctctatgttggagtcttggagtctcactctaaatggctttttttcttccaggcaattacctcctgctaattaggaagcaaggctgccagtcccagggccccagactgacccctttctcaacccacagggatgagggtgtatggaggcaatgagtggcagcactagtcacaaacacttcctgggtcacagccggtcagggcagtggaggatcaaggagtttcaaggacatgaagggaagtgaagatgctggggggtggggggcgtgggtgtggctgaaatggagtgagccgggagaccaggagctaggagcagcttagacacacccatgcggaataataaagacctgggcagcagaaggggccggaattacctggaaacaaggatgtgggggaaggaatggaatagaatgaatgaatgaaggaatctaaggagacagacagatctccgttcttcagagaggcaaaagaaggcaccccttaagatgaccaagattacaaaagaggatggcagacagggacatactgggagactccaagagggagaaggagacaggaaggacagggaggagggaggaatcactgcaagaacccccagggaggagtggagaatgggggagaacgacttggagtggcagctcccagggccccaagaagggctatttctacatcgctgtccttgagcctccccaatgtcagtccccagccagccaggcctgcacgccttcctacatagccacaggtgcgggcaggcgcgatgatcaccaccagcaagctcatgccccagatgttccacattctggggacagccagctgactttcctccatgccaacctgtaaccccgtccagagggctgagccaggggaccctcctgggtcacagtaacatgacctgagcatgtgcggctgtgtgctgcagcctctctgtctcagcaggaagatcaacacacaaagaagtagtgactggccaaggtcatacagcaagtgggcgaggaaaccagacacagaggactcaggggctacgtcccagtggggggtcccattctctgctgggcagcaacagcagatgaatgtggatcttggctgtcagcaagccagaccttgatgtggtgtaccacatggaagggagcaagtgtggccaggggctgaaagaaaagccaaaaagaggggagtggggggggaagggtgctgggtaggagggctctgcaaaggcaacaatggcagctaacattattgagtacttactagtcacagtgtgtcacctgcttaccacatgatgtgtgggatcctatttgatccccatgacaaccctaccaccctattatagtgaagaaactgagacacagaagaactagccagtgaaatggctctaagctggtggccggccagccagccatgttgaggccactgtccagaagatccctccactatggccttgtctgagttcccagctctgaaatctaggcccaaaataccaatggggctgcagtttttcttgttgcatgaaagagagaagtatcataaggtcccacattcaataagtcccatttccctaggttctggtcttagctcagccactcactgtgtatttcaggaaggtcatttgccttttctggggcttggtgctctcacctataacatctaagagcaggggccagataacaatgacagatcatgtgtgcatagtgcagacttgctgatagacatggttctaggtggtttatacacctagatccccagaggcagcactgttgcctccatttcacaaacaggaatggaagcaccgcaaggttaagctgccgaaggtgacaaagtggatcagtacacagcaggcctggggtctgaaccccatcgcttgtgtgtctatctgtgcaggtgtgtatgtgtgtgccagtgcagtgtgtgtgtgtgtgtgtgtgtgtgtgtgtgtgtgtgtctatgtgtgcatatgcatatggaggccagaggacaaccatggatgttgtttctcaggaactgtccaccccgggttttttgttttgtttttttatatctttatcatttatttcgtttggaggagcatgaaggtgccacagcatacaagcggaggccagagggcaacttggaatagcttttctttccttccatcatgtgggtcccagggtggaacacaggattaggcttggtggcaggtgccttttcccgttgatccatcacaccggttctaccttggtttgttttgtcttttttttgaaacaggatctctcactggcttagagctcaccaaggaggctgggctggctggcaggcaagcttaggaatcctcctgtctcttcctcctcagtgctaagattacaagggtgtgccactgtgtgggattttgtttttaaatgtgtattttggggattgaactcaggtactcatgctttcaaggcacacactttaccaagtgagccatctccccagcccagaatcccattatttttgatcagaaccccagtgtctgtctgtaccgtcttggtcatttccctgcatgtgacttgtcctttacctgctcatctgttcttaatcactatctacctggaatagccatgctgggtctcatatgtccacaagcattccagcaccaagaagaagccagctttaatatgtgcttatgtacacacacacacacacacacacacacacacacacacacacacacacctctgggctctggttcatttgtggagaccttgtgccatgctgcagtgcagagccacgtggtagtgacgtgggccaccacaccctctctcctctgcttccctctagtgcctgggtggctggcacgtcacatcacacacctgctggcacccccatccccactgccttcctcacgcctctcctctagcagaagcaggcaccttctccaggaaggaagcaggctcaggcacagcctggctcccacggcctgaagatgccagccaacttgggggtggaaagggagaaagaggcatcagcatgaggcttgggggcttagggtctatggttcctaacaaagaccaagtcttctctcagttctggctatcataactcagctctcgcaatcctagggatgccagccctcccccccagtcatttccacaaatgagaagatgggggatatgggaacagagggtctagccctcactcccaagtagggcaatggtaccacaagggctcctctggctgagttttaactgcacccctccatcccatccctggtccctacgctctcctccccctgcccaaacatctcagagttctgggtatttttaggcctcagctgacaggctgtgaaatcgctctcttcgcacctccccaaccaggcgggggctggagagggaggaatgaggttggggagggccacgtagacaattcactgggctcctcccaggctggcaggtgccaagcagtgagtgaggggctcctccccttttccccagatcttctggcaagagaatccctccaccttgcctagagaagaatgaaaacaggatagaaagggacctctactccattcagggactggagaataaagggtttatgaaggtgctggggacaccctctgagtccgactctgcagccaagccaactctaagcactcccttctgagagttgggctgagagacaggctggctgggatcctagtaggataaaggaagcactaggcagcatagcccagtggttagcaaccaggctgtggactaagaatgactcaaactctttatcctgatttgtggaataacctagccaagaccctctagctctctggtccttagtttcctcacctacacaatctagaaaacaaggtcacacacacacacacacacacacacacacacacacacacacacacacactcaaatggcaacatgtgtgtatgtgctcagtgtaaagctgtttgccctgggatgacctctccctagggaaataggaagatatatccacaccctgctggaaatgggcccctgtgccaggggccatgagcatggaggggaggtggcctgcctagttgtcatggagacagtttagctctgttgagactctgcagcccaaatctggcagcatgcgtgtgagttctgtggttcctgttatggcctcaccctgatgccctaagtgaggggtggggggtgcagagctattcattagcagtatcacctatgtctctggggcccttgggaccactcaccttagcatctcacccagctctgagaggccttttctaattactccagcgctagaaggccctctcggggtcttcactgatgcccatccacactggctaccatctgactgcccactccccaccactggtttgctaaggccagggcccagggcagctggatcctgaaaacttaaggtcttggactcaaccctgctcaggtgagagattgaggcaggaaatttgagacagagctgggcaagtatgtcccctggtgagactctaactccattgccagcatgctgccatctcccacactgccactgttaaagctctttacagcgatctattcaaaagacttccattaccttacaaaaacaaaaacaaaactggggatgtggctcagttgggagaatttttggctagcatgcacagggccccgggttcaaacctataatcccagcacttgggaggaaaaggcaagaagaccagaagcccaaggtcctctttggctatggtagaagttccaggccatcctggaatacatgagaccctgttgctcctcctgtcaatagctcagttctatcatttctgaagccaggccttttctaatctggctcaatttaccttctcaggcctcactccgggtactgctccctagggtctcccttccagccaagttcagacgctgctcactcgactggccaagatctctcctgcccctgcacctttgcaagtgcttgctcccaattgccaaatgcccggcctgtgcttcctcctacggcaagctcttgtttggtcttcaagacccaaaggtctgagcccaaagctcttggatcctgcagcatggctagaatcccaaattgacttctaatggcaagtccttgccagggtgtactgacaatggacgtgttatgcacttagaagagcatgtgtcacacagcaaacactccacaaatctgtgctctcctgatagatactggctgccatggcttcagtggaatcctccccaaactcttccactaaggcctggagcttccagaacccccgtcctacacatcaatctctcacaacggggtaatgttgataacagctgcccttccatatcacgagtgtttactacgtgtgaagctctgggatggatgactacttttcttgcctcactgctcctcatcctccagtcacacagaaaataagaaacatcctcatgcccatttcacagagaaggaaactgaggcagcaggggaagagtgagacagcaacaattacctctgcaggaacacacaaagacagcaggtgggttcagggccctggcttaagcaagccatccctggtagcacatgtgtaaggtgcctgcaaatagactgagtgctctgcaaatacgagcttgctacgatagtgcttttctgctaacactagtagagaggaggtgttgggtgagctgagaaggaattccttaagctacatgacctgaagagcacaatactccattgctggaggaagaaaccagggactcagggggcagggttctgctatacttagggtcagacatgggaaggacagggaacccttgtatcgcactggtcctagagaccccgtgggatgttttgatgagcagctcctctagggggctctggtgtactcagattgggccaagcaggagagggcctgctttgggctggccaagccagccacagctctctggtcctgctgacactatcctgtagtaatgagacggatccaatttgtacccagagccccaccgggagcagccgccgctgcagggtttgaagtaatttaatcggacacattagccacacagctctctcctctactcccctgtttggggcttcatgcaggcacccctttctcacttacccagccctggcaggaagcaggcacacacaccaccaaccagttaggacagactcattggcacccctcttttcttttttctggggttcctggaggcgcaaaaaccagaggctcctttttgctgatgcaaacagtagctatggaagctgattgaagctgagactcagaccctcccttctgccttctccagtggtacaaacagggtcacccctttctctccatcaaagcagccccagaagccctcatcctcccagactccaaggacacagaaagagcagggcaagacgcataatgctattctgacaatatgtttggttctgccactatcagggtaactattgatacagggacgatccttctcttaggatcttggggaggagtgcgaacacaaatatatgcatagaatctgacagtcaccgatgcacagatgagttcagtttaacccagctagacacacactcagacgcacacacagacacagacacacagcatcacagtaatcttgtatctgtatacagaatactcctacaaccatcccatgtccacacccatgcatgcttacagctaggtgaggccctgctccctgaagatggaagcctcagaggtggctaagttggcaggttgagggtgtggcagggggcaggcaggatccctagagagcccacaccctaccaggctgagtatagggcccagggaggggccctccccaaagctttctgtctcagctcccccgtgcacctcaatacacctcgctatgaatacactcattagctgctgtttacagcgggcagggcactcggcactgagcacagctattacggccagccagctgccgcccgcacacgcacacacgtaggtacacacagccaccaagcttctaccaccaccctgtcttccccttccccctcactggagccccacatgctctatcacgtggatataccaattccccaaacatctcagcccaaccacccaggacgacacacctttcccaagggtcccttccaggtagaagctgccaagccttcctgagtagccgacgagctagaccacctttctaccatcgggttggaatgcaggcatagatgctgggctctctccagtcccttccacaggttccatgctgtctgccaactctggtccaaccctcagggaattctgctgggtgagacaaagcctggccctccagaggcaaattggacagagcccaacagggctaccccctgctgcctgaaggtcagcacctccacgtccatggaactggcgcaattcacttggcaccactggctggggttccctggcaaggtagaagggtacccaggcttagcctggcacaggctggctccggcacctggccagagcagtgactgccctgatagagaaaactgacctcattggccacgagtgccacctgtgggcactgaccatggaatggggactacacacaaagatgtccgtgcccacctgggacatctcagtatctctgaggagcccatggaaccaactctccctcctccactcaggactgagcctcccagccaccatgtgcccccccctcagcagctactcccctgctgttctgggcctcactcccctgggggaagcagttattgaaaacggtccatcagattcaataagaatccaaagtccctgagagaatagaggggtgggtggagagtgggggtggataggaggggaccacatgctccttcttgctcttcccccatgacatgcttcaatatgggggctggagggcccttgctctgctgcccttggagcctgtgggtcagctagggtcaggaccagctgtccagagacctctcttagtttacttgatgcccaccgggtcctctgccttctagctttcctcccacccctccccaccacctatcccaagctgatctatcaccgtgatccaactttctctgacacccctaccatcaaagggaccaacctcttttctcaatccttgggttcatagacacgtagcctgatgggcaagctgtcccacaagaccacagaacagcatagagtcagtgagaggcctgactccacagcagctctgtagcttagaggagcccctatagggctcatcctaagactaagcctttacctgatgggtgctcttcccttcccacctggtccctggcccccaggcactattactccacagcagctctgtagcttagaggagccccaaaggtcatcctctcccaatgcaatgtcagacttgctcatcctcagacccccctccctgccatacctgttggagggatttccacacccagccttggccctgaccccatccatggtccttataccataaacttagtctgttctttcggccctaactccagcctcacaccaaccctttgacagacttggcccttaagttgttcctagggagtagataggtgatttagacaattaccttgccatgccaagccctctgcccatatatgtgcccctttacccctaaggaatgacctgcctgatggagtgtctgtagaggatagagtccactaacaggtgggacagatggaggcttcaggcactgctgtccagtgggacaaaccaagtcccagaagcctggtgactaggtaggaatccctcagggcctgacctctctctcccagcccttctctctttggccttgctcaccagctcaccgcaaggtcacttctccctccctcctccttcccactgctgtcctgcctgtcctgcctacccactgcaacgctgacccctgcaggcctgctgaggccctgcccagcctggggacaggcagtcagacagactaaggaggcaggccaggccagctttgggatgcagaggataaaggatgggagggagaagacagaggaggctgcaggtagggcagaggtggctgggcagtctggagcaggagctcgtaagtgtgcatgggaaggaacaggtctgctttctccatctggttcctgttctcttctcccacccctttctttataataacaggagtaatagtgcctgggggccagggaccaggtgggaagggaagagcacccatcaggtaaaggcttagtcttaggatgagccctgtagggacctgagaagagagagagaaagagagagagagagagagagagagagagagagagagagagcacagagggagagagaataccatagggaccctctggaactggcctggagcatgaggagcagaagaggataggtatcttttatttatttatttctttatttattttaacaaagcaacaatgggccacaggtgttcctgagacgggtggatgaggagaccaggctgtaagaggtactggatcctgtgggaccagaggggagatgagtgactggtctgagtcacacaggaattaatttgcatatctcactcctacctggtaccaggcaaaggggagttgtgggtggttggaaatgggggacatagggccctagctgtgggtagcagagtctgggagaccttgagaagctgctacggatgggagcctgacatggaactatagaaattcttggaagtgatactaagggtcacaaagggcctccagagatcccagaggagcagaatccaaacataccctaccccctacaacctatttttggttccaccagcccagtgcccacacaagagagaagaaaacctcaccagcttccttcacagtcaggaccaaccttgccacgggcattggtggaccctgcagtttcaaggggcaagatgggcaagcaggaagggaaaggtccaggggctgccaggctgtcaggagcagctgtggaatccaggccttttgcccagaagatgccaagcacatcaggttggcctctgtggagagggcagaggtgcttggaggagtggtaatgtcaccatgccaaagtattagaaggataagagtggctgaaggcatggccccaggccaatggcctaacagcaatggagactgtccccactgcactcccttccatgctcattcctgagctgggcttggaacttggctgctgagagtgaaccaagcaaaaggatgcccctgcctttggtccaagtgtaggaagctgcctttccctagggaacaatgtcagggtaggtgagctgggttcagacagacgaggaaagggcccctcaaaggtaatgtcccttcagcccacacctagaggacattcggagaagggcatgaagccccagagaagactgagtctcagacccaagtcctgagtgagtacagtgtctgccacccagtaggtcaacctcagtgaaactggagtgcctcttgagagaagacagcaagtgtggactgggcacaaatgggcaaagccaatgtccacccgttttctgtgcagaggttcagggctagagtccccttctgtggagggtttcagcgtcccccaggacccacagcagggaacccagagactcttgtaggactgagtcttaggctggagccctgctcttagccttggagaacagcccagaaacagagaccctgggggccaggaggctgaacaagcagaagtgggggtaagggggttaagctgggtctgaaggagcatcccaagctgagcctggccaggagctgcaggggacctgtctacaggtgggcactgcgtgggggaggcgtcaggaaccaaggaggaaatggcagagcaatttcccgaggaaggaggagagattcctggcatgggctctaaggatgctataaggatgctaagccgacagtgggttcccaggccactcccttttagaaaggcaaaggggtgcggcccccttcccttccctccctggtaggactggagtgagtttggtgttctttgcgtccccctccccaagcccaggagaacactgcccagccacccccattgtcatccgccgctgagatttctcttcaggtacccctgcctccccttcaccgctcctgcggttccccaccccccagaagcctctatcccccgctgctgcaccagattcccacttgccccctggagtcctctcaattcacagttggcaccgcagatgacactctgctcttctgtgcccacaatcttggcccaaaactgccaggatcctccttgccccgaggtcccccaacattgacatccccagggcactggtgctggggagcagggggtacctctgaaggcactgcccggcacccacggggacagcagctcctcgctccgccacacacgttgtccttgggctgctggggggtgggggggaggtccttgtggggacactgcgaacccggccccgggcatccagcctagcaacgtcccgactgcggggtctgagtctgaatctctgccgctagaacccacgcccccggggctgggatgaccctggtaggaaggggtgcaattcgtgcggttccagccgacagcagccctaggctggggctccgagacggcgaccaggcgctgcagccatcctgcccgccggtgcggggcgccccagcccgtgcggggcgccccagcccacgcggggccgcgcttacctgggctggccgcctccgggtcccggtacatggtcccctcgtcgccggctccctccgggctcctcagagccgcctgcggccgcgcgctgctctgccgccgctgcagggcatggggccgggcgacccccgggggcgggtccgagggcgggggccgcgcgggctgcaccgagccgcggagccggggagcgggggccgcccgccagccctcccggccgcccgcggagcacgctgccgccgccgccgagccgcgcggagcctcctccctctggcctgcgcgccgcgtgtgcgcgccggagcgtgtgtgagtgtgtacgaggcggagtgtgtgtgtgtatgtatgtatgtgtgtgcgtgcgtgagtgtgtgagtgtgtgtatgtgtgtgtgtgtgcgcccggggcaccgccggcgccgcccgctcgccgccgagcgcacggccactgtcactgctgcgcccactgccggccgcgcgctgcactgcagccctgaactggccaccgccgcccggagccgccccgagggcacggccgccgccccgcacaccccaagtgctcacgaagctccgcttggaagggccgcggagctccacggctaggttcgtttagactatggaagacgcgacccactcggctcgtgagccacgggtggcggtggactcgtacgccacagggtcgcccagctggccacctcctccgaggtgccctctgactccgttccgaaaggcgtggagatcctacccgggttttccgctcggtggccgctcgagggcgttagctctggactgggaaaagcggaggacctgggaagaagggttggtgggtatcaaaaccaggagtggagtgtgttgcctgcgctgggcctcggtctgacagtcttgtcttccccagagctggcgcgctgcaggaacagataggactagaatctccatcttccgtggggtactacgtatcgcaacctttcccatctatcccagctccgggagaaaagaaagcagctgttcaactcctattcattcctctctcgaccctgttctcccggtcctcccctttcacttgactcagtgtgccccccccccccccgccgaaatgaaatccccttctcctgtcaaccttgaggatctcttggcatgctctctgctatctgctccctggatctgtttaacattttccaaatctgaaggactccgtttttctctacagaattgggattatttgcttctggggcaaggaagagaccgaatcatgtcccaagaactttgaagacccaggaccgaaccatgggtatcaggtaccaggcctccttacacacatctacacagggactcacttctctgcccacagtacacacaagcatacaagcagtctagctcacaaagagtcacagacccttcctaccgagcaggtcttgcccctaccctgcactgaaaggggtgggtaaaacagcacaatctttggattacaaatgtcagtgtccctccttccatgcagtggacaagtgaaccgggctctccaacactgaaggcttctgcaccctgaaagccatctagctggcttcatgctgtgtgtgtggctcatgccctaccatacctccacccctacgtggtacatgcagccagcaccaatggggacaaatcttagttcccaatgtcccttattgtgttcatgcgcgagcgcgcgcgcgcgcgcgcacacacacacacacacacacacacacacacacacaccacacagaccattctctggaactcacatgggggttacctccccccagacacacacacacacacacacacacgcacacacacacacacacacacacacacacacacacacacaccacatattcacctccacccacagcttttccggttgagaaatagataaggaaattcccccagcaaacctctaagattgttccggtggaaaacagatttcctgggattgactattctaattaaaaatggaagggggaaaataaaaaaggcatgtgtaggttaggcctgtaattccccccggggccagaaatctcagccctcacccttggtcaagggctattttgttccacatcctgcagccgtccccactcacatgcagccaataacccaggcactagtcacagcctgcgttgggggctaagacagtaggctggggttctagggtctccggcctgtctccaaatccatctgcctctctcagtacctcctaaagagtgaacccccagccatcagtgggtacacaggaagggcccctcttcaggaattttcctactccagatccctcccaccctcctgagagagaagagaggggagcagcacaatcccttgccattgtaacttgacaagtttttcccctggcatctagaagttcccattttctcaaaactgatgaggaagacatcagagaggtgacccaagccacctcctccggtgacaaatggtaaaagtcaagcccctagaggagactcagggagccaaaagctctgggggttcacaacacagggcactgctaagagacctggagatgtccttggtttaattcccacattttggcctgccattctgagatccatgaaaagagccttccatttgctcccatcccagggcttacaaataaaactcacctcattctctcagcaggcatgagatagccactactccaaaacagtggagatggacaatccccagacatgctagataaaacctcaagagatcgttttgtgcaaaacaaggctccagggcattgtgggttttgatttatttcttttttatttttattttttgaatactggggactgagtccagggccgtgtgcttgctagggaagtgctctaccattgagctaaatcttcaaccccctaagattttgaaaactccttttctgtgggtctcaggcactttgtttaggggaaacaatggcattggggggaaaaaaagacgtacacattcatgtggctttgccattcgtagctgtagttaatctgcatagacagacgcgtgtcttggggccttggtttcttcattctgcataaggaggataacaatacttatttctttgattactgcaagactaaatgtgttgtaccattaatgatacttgaagcatctgatttattcttgatattgattactattgttttaatccttaagagagatgctgtatactctccattctcatgttttgcttgttgaagaaatcattgcagaagaaatctaacctcaaaccattttgctacatttgaaggctactctctcctgctatagcatcctgagagcccagccagccaggagctcctgctttctaagcactcacaaggactaggcagttgcagaaaatggattctacaggagaactcaggtccttggacaaaaaaaccaagagactgtgaattaccccagtccctgccctcaggccctgactcttcttagaagaggtcctgggcctctggagggggccttcagaagaactcctttccttccatgatgatgccagttgggcccctgtgtcctgagttccatgacgtggcaggaagcattcacagcacctagtcccccaaggactggcttgctgcatgccttggacccctcaggcctgtttcccatctggtgcagtcattgaaatcaggtgtcctaggtcagctgcaggctgacagtaggagcagggagggacattttgtccctctggagcagatgccaggcctccactctcccaaacagggcccccgaggccacctggctgtgttgctaggccacgacaaggaggcagggctcctgggtctgccagcttcttggctggcttgatctctatactgctgtttccctacagtgcctgtcccctcacccccacccaccagactacaggatgaattattaataaaaatgctgaggaagctgtttgtgcgtgcatgtgacagaacaaacacacctctctccttgtcaccatccaagtggcaacaggctcagactgagcattggcctgatccagcagtgacaggctgaggccagctagcacagtcacatcagagcctacacaataggaccagcctaaagcacttgtccccacccccagccagccccttcctcctctgcagaggcccagagtcgggagtggataaaagcatgggattaacagatcaggcaggtatggtactgtatgcctggaaccctagcacttagaaggttgaggcaggaggatcaggagttcaaggttaacctgagctataaaagatactgtgtcaaaagaacaataaactgatgccatcacccagaagggacaggacaccaaggaccaacaaggtgatggcagctatcaccatgcctgtctcatcacaaggaggtgtaatcaatacttttggatttcctccccatgcccagccctgagacactcctgctttggaggcctagtcctaaaaacatggatgcagtccatgccacaacatcaagagcagaattctagtcctgtgctctgctcctgactctgtttctctagctgttaaccatactggatatctctgggccttggtttctccatcagggctaaaaatagtactgcagagatgtcaaaatacattggcaagatatggcaagatgtctttcctggctcctcaagggtgaccccaaagcatcaagaatcctgaccctgcactgatctctccatagctacaggcattcaagaatcccccaggctgttgcaggtccagaagcatttcttaccagaagccccgcctccatatcacctgtcctcccgtgtgtttctcccatcttgattctctctctttttaagctttcaaaaacatttatttatatctgtgtgtgtgtgtgtgtgtgtgagagagagagagagagagagagagagagagagagagagagagagggagagggagagggagagggagagagagagagagactgtgcacatgccatggcttgtgggagtcggttctctcctcctactatatgagttcccaggaccaagttcagatcatagggtttggtggcagatgactttacaagctatcttgtgctcctgtctctcttttttccatgttccttctgatagccatccatactttgctcagcttttgtggcatctgcccccaaagctgaaaacaggtgggcttcttctaaggctacagccttaatgggaagctttgtctcaggcctctttgctgactcttgggctgctacatacccctgagactgactgaggccctttggaaactcctcagcttgctgatgccaagctcggggagctagggtaagaccctcaattcttctgagaatctgtttaccattctatgctatagggatgctgttttaccatcttggtagtgtctcaggcccttctggggatctcatcttcctagaagaaatgcagacacagatacaacattttgcttatcagtaagtatgcggtctagagtttccaggaaaagctcccttgtcctgaagctctgcaaggtggcttccaacagtctcagcctggttcttagcgctccttgccctccccatgatgactctgggtcatgagagaggtgggctaggggatctattcctaaagtgtttccctgtggcctctcccttcaacattgctgtgcctggagccagcctgtctgcagctcagactggtgttttaatccttcttggaacccattgaaccggcttcacctgcctttcaaggtatttaaaggttctttgaccaaatgctttttgatcctccattgatgggaaccaggcagaggctctttcgccagctgccccattccccctatgtgattagtctctaagagctctttttgatttgcagaaactgtctgtggtttgttcaaagccctagctcttgccactacctcccccagagaaccaacctggtcagctccagcctacaccgcccatccccagtgttggcctagttaacaagggcctcccagtatcaaactcctacctagactgctttgggaccccagcccctactgagtcggtagagaatgcatccctgctcctcccaaggagcttcctggagtctggttatcatgcaaagagatggggtgaggaattagtggctcctagagttcagaggaccatacctctgcttctaccccaaggatggacaggccagagggtcatggggtctctgggcctgttttcggggtccagttaatgatatagcttgatgctgagagagggggaaactgaggctctgagtcccagattcagtgttcccagtgaggggacaaaaactagaacatatcatccagtgtcttcaccacccctccacaccttaactcccttcaaggcagaatttagtgtatcccaggttggcctccaacaggttatgtagtcaaggatgaccacgaatttctgatctttctgccttcatcattcaaggcctgaggcagcaagtaccagtaagccaggtttatgtagtgctggggatggaaccagctaggcaagcactttaccagctgaactatatacactcccaatccaatcccaagatgtctgtgctccagtaagtagtggcaactcccaatttccaaggtgcgcctccactgggtttggatctaaaattggaggatgggcggttggggagagagaccaggttcctttgctcctaatagtggacaacctgtgatcgcccagcttggggccgtagactggcccctctcaactggagcccaggagcccagagaggagcgaccttccccagcagctaggaccaacccggtgctggagtgcgagtagagtcagggtcctcacaggagaccgaagaggacggtgtgcgcgtgcgcggagggggcgtggcggcgccctcatgagcggacaaattaccacgaactaaagagaacaggacattgcactcctgggaaaaggaggagacccatcctcagagctaataggcaccgcactctggaaagtgctcaaacctctgcccaaggtctaccccagctctaactgaagttgaagactgcagtgggtgcgaaggtccttcagatcacaggattatccatgaggagacacctggtgtcctgcaaccaccctcccaagctttgggcttaggacgagttccagcaccccagtagggggcgagtgcagatcaccagtaccccttcttcaccaagacctccagagaggctgctgggcaccttagctgtgccagacccagcgccagaaccgagtcccggcactgtaataatcataatagtagcagccagcatttattgagctctgagggcttgcctggcccgagtgccaaatgcataacacgcattatcccacttaatagtcacagcaaccaacgtagacatcatcttgtggtgatccccttaggaagataaggagcttgagccttcccctcccccgctactctgcaaggtcacagccagaaggagaggtaagggagccagtcacctgagtgggctttgctgctctgtgacgctttggagatgaaactggacaggtaccagaggcagcccctctcagccacctgtggtcctgcccacagaggcccctaacattgtgggaggagggaaaagaaaggattctacctcctacatcttggctgctctaatttctcccaggtcccccgtattcctgatcctatccctcccaactgtgggtggcccccaaggctctgtcctcagccttcatcttccatcttctcttcttgtgatctcattcactcccccacagcctcagctcctacttcagcccagcttccagccctgtctctggagccctgacctcccttccgagcctggcatctgcattcttaatgaagcatctccacccaggtggagtgaactcattcccttccccagggaagcagcccccattagatcacagggccgcccaccccagaaggcctcattaactctcccaagccccagatctgtttcccacatccttctggtactcttcccctcatccagtcagcctctttactctgcagagcttctcacaccctgtctctgactctgcagccacctccccaagtcacactcacagcctctcaccctgtgcctcagccatggctcctgaccagtcccttgcctccttctgtccctccctcccagagtccttcttcactgtgactttctgaccaagatatgaccaggacccttgcttcctacatcctggggatcttaaatagctccctactgccagtggcatcagttaagagtagctttgccctaggtggtcttctctggtattgtttctatctcctgcccccttgctggctcagtgtcccatctttagctaaacagtctttctgagtttccacctatgtgtccccaccgtttgaggcccattgacaattcatttcttccagggagctgaccctgattgtcttaggagagcccgaattctcttctgcagcccaatagtacttccttgatggaatcacttaatagtatttaacatctttccctttttttgtttgtctgtctgcttttcttttcaaaacagggtttctctgtgtagctctggctgtcctggacctagatctatagaccaggttggagctcacagagatccaccccacctctacctctggagtgctgggattgaaggtgtgagccaccactactcaagcttatttagcatttttctaaaccccaatgcactggagatccttcttttatttaactttttattttatttcttgagacagggtctcgccatgcagaccaggctgaccttgacaagctcctcctctccctgtccctccatgcctgatttctgagcctgggattacaggcaggcacccacacctggcagtggaaactctttaaatgcaagagttacttattactatccatctccatcttctttccttcacatttttatcaatccatccaacaaccatgggttaagtagctactttatgctaaacattggatataaagaagtctacttctgggccatctctgtgccaggcaggcaggggaatcgagtcagtgacagaggggtgtttgagtatattcagtgtgatggccccacccggtgcatgcctttccatccattagccaccggaatgccagactataggtgatggtatacagctgacataaggccaagccttgcaaggaacagtacagcatgcacacttgcaggtatgagtcaagtcctcttggatgaaagaaagcaatgcaatgaccttagccctggggaaatacagacgcttcccaaatgcttactgtgttgcatcaagcatgagtctcataaatctttgctgaattaagtaggtttgaggcagaaagggaacatacatgggactagacaggaaaagaaaggctatggtgggtggggtatttttgtaacagctgcacaaagtagccctgccatctactacagagggatagatcatggacatacaccactctgaactctcaagaagaagagaactaaataaattcattggtgatattattagtctgtccccatcaaaccaggtaagtccttctacctatgaaacctcagcttctccacccatgaggcaatcagctgtaacagctcattgttctcaccaggcctcagtttctctacctgcagtataaagatgtgaaaaggtatggcctgaggatctctggttctgctggtgacaagtcccagggtcagtatcttcctaggacacaccttctttgttctatcctgcttgccacttcctaggctgagctgagctgtccacacagtgtcatcaaggtcactcccggacacatttgtctttctggtcaaacaaggtcatggggactttttatcagtgagtagtactcttataaatcctggagcatgggcttagaggtttttctttcttttttgtgtggctctgttcacaagtacacatgtgtacagatatatgtacacatgtgtgtatgcatgtggaggccaacagtcaattctccttcaattgctctccaccttatcttttgagacaggtgacctctcactgaacctagagcttgcccactggactagactctctggccagcaaacccagggtacattttctctttgccttcccagaactcagactgcaagtgtgcacagctgtgtcaagctatttacatgggtgctggggatctaaactccggtcctcatgcttacatagtaataataagcccctttaccaactgaaacatctctctagccccttagggcccattttctaaaaaagccctttgtgtagacacttcttttccatcccaagcccatggcctggtcccctggggccttcctaccccaatccacacaggtcttggagtaccaaatcccctggtgaaaggatggggcctgcagccagagagaagctcctccaggggaccggcgtgtccccctgatcatctcctgaccctgtaaaggagacatcaaccatgtctctctccccttttttctgtaactagcgcacttttctgtagttgttacttatgtgtgtgtcactatgatcagatactggccagaaagaactctcgagaagaaagatttgttttggctcatggttttagagaatttcggtctatcagagtcatggtagaacatttccttctgcagcagtgggagtgtgagaaactgttcagatggccttggatcaggaagcagacagcagctggaactagggaccagattatgatctttaaagtcccagccttagtgacatacttcttccagctaggttcaaaaaaaaggaaatcatcagctgggggacaagcactttaatatgagcctgtggaggcggggcttcagattcaaaatttaagaagtgataagttcccccccacatagtatcccttagtccacaacctctcaataccttcatcctctgccctcctctcctgccctcctctcctctccacatcccactgtcctcatccccttccctcatccactgccctccttcctacccccaacccctgccctcattatccgcccttccaagaagcttgcgccatagtccccactcagcctccaagctggcttccccttctgtgttctcacctatggcatcaaagcatcagaccagagcccttccatggttcccctttgcttttgagcaaaagctcagattcccttcttcacctaaccagacctctgcagtgttgtcaaagggggatgatataattcaactgatagaatgcttgcctagcacgtgagaagccctgcatttaatttccagtgtcacataaaccagatgtggcagggcacacctgtaatcctagcactaaggaggtaaaggcaagaggatccggtgttcaaggtcatcctcagctacaaaaagagcccaaggtcagtctgggctacatgagagattatttcaaaaaaaaaaaacctctgccaaagggttatggggagcacacttcagactgtgggtacaaaggtaggaacatgtgatggcgcctgggtgggaagagtcagaaacctgatatgactggagcctgggacgggcatcagggtatatcaggcacacctggtatgttctgagttctcatgctggggatgcagcagggtctgaaataaagatctctgcccttggaaagctgataccctagcctggcagggtatcatcagcactaagcattggaatacagagtaagttagaagacatgagcactgtggggataagagatggctgtggcaatattcaccaggtggatggggcaagttgcctttagaaatggtcatgtggataggcttgagggaagggagggatttggccccgtggcctgggtggtaatagcgaatcggaggataggagtagccaggcagggactctaaagtgagagggcatgctgaggccagagtgacagcaaggagactgttgggctggtccaggagaggaagggagatgagatgaggaggacaaatcacagcaaggacttgggagttagaggacctttgagtacttcgttaggaacaaggacagatgggagctggcttccgtggtgggggagcctctgcggctgtgtggaggaactgggcaagcaaaaggaggcaaggtggatgctggtgcgataatccggttgagaaatggtggtggttggatgccatgggggaggcggactgtggatctattttgaaggcagaacccaaaggatttcctgatggattggatgtgaggtgtgacaaataaggaggaggtgaggcagccagcagggtttggcctgaataatggcagggtagcattgccaagggctgacttgggagggtcccttgccagctactctcctttccaatcctttctcatatcgcccactaccaaggaaacttttaaaacttttcccccagttgctccttcctatggaattttaattccaaagttaccataagttagtatactttgagaaaccacaaaccattgcactatgtaagaggatttttgtccttcaataaccaactttcgtgtgcgtgtgtgcatgcatgagtgtgtgtgtgtgtgtgtgtgtgtgtgtgtgtgtgtgtgtgtgtgtgtgttcactggaggatgtgtataatggatatagtcaaaaaaaaaaaaaaaagggagaactgagctcagctttgcccttgttgggtcagagctccctagtgcagggaaaggtaatatatggatgaatggatacttgaggtccaaggctggagatgaggatttggagtcctaagtgcatagatactgtttcaaggcaggagagtgcatgagctctccaggggagtaaatgaagagagaccaagatcaaaggctgaacttggagtacacagtgttatctaggggaaagagaaaacctgcataaaagttggaaggagcaacccgagatgtagataaagaaggggaggggaggggaggggagggaaattgatgacccctgggtacataatggaacccatgttcctaggtgcaggaggctatactgtcaaaggtttccagaaagccagctgtagggatcctgaaaactgatcactggtggagccacatgggggccttcagacagcttcatgagactatctctgatagaggaaactctagcaggaggtttttcagagagaaggtaagcaaatgagctatagctggggtatggagagggcaagccaggatccagggggttgtgtgaggtttggaggaaaggcatcggatttgtgtgtggagaggtggtcaatacagcagggagggctgagggtgtgtgacatggggaggatgtccttgaacagagcagaagttctgggttctgtgtctgaatggctgggagcataaatagtcacaggcagagtgtgttggggtatagtggtgggtgcagatgctagtgaggaggcctgcagccatgcaagcatggtcggattgtcttcagggagtggtcaacctctgaaagaggactagcaggggaggggaggccatccatgaagacacggatgaagggagcagtgatcacagccccaagacttccagactgctcacctccacgtctcaagttccctgactctgctgaactttaactgcgttgggtagcagagagagcagagattaagtcaggtgtcatccttcatgtgctgttcaccttgttggctgagagcctagagtgtgctgattagggtaagctggctggtgatcaagcccaaaggatcctcttgcctccacctccccagcactgggactacaagtgctctccgccacaccgggcattttggtgtggctactgaggattgaacttgaatggcaagtactttaatgactgagccagctctccaggacccaatttaaaatttttaatatgctcattcctgtgactccaccagaagagggagggtccttacctcggacctatagcaagggctgtgtagtcaagcagctggtgttggaaggaatctggcctgtgaaaagaagcagaggaaggagccagctccatgttgttggtgttttatacctgtttcctggagagggggtgaagctgcaatggctgaagagaggaggcactaagagtgggtttgttattcgcttctgcatatcaagtagaatgaagagggctatgtcacatctgtgtccctgctgaggggtgactttgagttcctgaacactagtgctcaactccatctcgtgagttgaaaagtgctcagttagcagccaggtgtggtgacacccatttccaatgccaaccctcgggaggcagagacaggtagtctctgagtttgaggccagcctggcctacagagcaagttccaggacagccaggactacatagagagactctgtcttaaaaaagaaagaaagaaagaaagaaagaaagaaagaaagaaagaaagaaagagagagagagagagagaaagaaagagagaaagaaagagagagaaagaaaggcactcaattatgtgtggaccctgggaacagacccagtaagctcagaacagtcaaaggccaaggccacactggtcactttcaatttccagcagagctcacaggatcagggaggtgaagcctctttccctgggctccacccttggacttcctcccccgcctggcccttcctgttggcctccctgcactccacctccccacctctggacacttcctccagggttcaagatagatgtggctttgtctcttaagagcctagagttactctgatgagggcatgtccagtgtgcaagtgtgtgtgtgtgtgtgtgtgtgtgtgtgtgtgtgtgtatgcatgtgtttatgaatatttatgtgcacatgtgtacacgtgtatatatgtgtgggcatgtgatatctgtatgtatgtgtatgcatgagtatatctatgtatgagtgtgagtgtaggggataggaggattgaaagagatgctatggtcttgctccctgctcataaaaagacttcagaaagaacagcatgagggggggcttagggtcctgtctagacacctgctgtgcacacttgcagagcagggccttttgttcccagcaagtcactctttacctcctgaaacctggagacaacaataaaacctcatcacaagggccttcagggagcaagtgctaataggccaggatgggatccatggtttggtaggacagccgcaatgttccctccccatccaaaggcctaggagagggctgggcaggagctgctaagtgccaggtggtggtaaggctggagtgcagtgggtacagacaaagtgctctgcgaagccctagtcctgcctctcgcctcttaatgaccagtcagagaattacaagaggctccagcctcaggtctcagcagaggctggctcctgcactaatggctggctaccctggcctctcatgtcctgtaagcaagcaggcagcctaatggagagatagttctcaggtgccccttggcccctttctctgccctcctccacaagaaggctatgacagtgcatctaggagaaatcagtccacttgctggggtctttggacatcacccagccatgcccatctgcttgcaccacaaggcaaaccaaacagaaaggcatggggctagcctacagatacacaacatcattcctaggaagcctgacacttctttgtcctccttcagatgactaagacaaaagaagccatttatggccctcactcatggtgaccagtcagaagaaacaaagtaggataggatgacaataaccactcttttttgctgagaacctactgtgtgcaggcaatgttctagatgtcaggaagagtgctgaatgggaatctccccttagagcccatattgccaaattcaggccctgtcactgccactcccagtttacagatgaggaaactgaataagaatggcccctgtaggctcatatatctgaaagcttagtcaccagagtgtggcactactcaaacggattataaggattaggaggtgtgcctttgttgaaggaaatgtgtcactgagggccggctttgcgattttaaaagcccacaccaggctcagtctctctctctctcttttttctctctatttctctctctcttctctctatctactgatcagtatgtagagctctcagctactgctccagcacttacctgcatcccaccatgatgatgatggacaaaacctctgaaactgtaagcaaagccccagttaaatgctatctttgtaagagtcaccttaatcatggtgtctcttcacagcaatagaacagtgactaagacaggaagagaagaagaatgacattgcttacccagtcctggtgtctcctttgcccatctgtttccccaaagctttgtatccctatcccctcccattgtgcaaggggagaccagagatgtggaaaacatggaatggaccacagataggtcgggctgggtggtggtgaggactcttggatgaacatgcagatctggaaaggtgtttctcataaagagcatgcctgccaggtagtgagaagatcatttcttcctttgcttttaaaaaatccctatctaaatgactgagagaaaggctctcaagaaggaagatgagccaggggtgcacagctgggctccagtgggcagatgctaccttccaggacctcctctacacccctcatctacagacccatgcccaacccagactgagactccaggctgggagagaaatgctagcctgatcccccgtaattcagctcaattacaatattaagacatgtgcatgtgtgcatgcacgcatgcatgcgtgcatgtgtacgtgtgtgtgtgtgtgtgtgtgtgtgtgtgtgtgtgtgtgtgatgctctgcctcatgcaacagattaggcacaccaaacctcagagcagagaaggggctgactgattctgggacatgtactgagttacaagcctcctgggggttccctggactcctcaggcttgagatgttcaccaaatgagaaggcatcaactctttattcacaggacggaaaagaatcagagaaggacaaagagggccaggagagatggttcagcggtaaatagaggctgctcttgcagaggatccaagattggttcccagcacccacaaccaacagctcacaactgcttgtaactctagctccaggagaatccaacatcctctattgggttctgctggcacctacacacacacaaactaaaaataaaattaatattttaagggggtctctttaaagtacagtgagcctccagaaggcactgtgcccacacttcatcacgtatccgccctcccccctctcccctttcacttcaaacagcctccccctgtctggctaacttccatccatcctgcaggtcagttgaggttctgtctctggcaggaagcctctcctggtttctctagtatttctgttacacttccctgctattgtactaatcatctggtatgtcataaatagacatctctatttttttattttaaattatttatgttaattttttcacagtactggttgtggggggcagggcaggagcccagggcctcacacaagtgggagaagccaactaccattaagcatcattcccagacccttatttgttcatttagtttaatattttattcattttaaaaattttatgagtgtttggcctgtgtgtgcgtgtgtgtgtgtgtgtgtgtgtgtgtgtgtgtgtgtgtgtgtgcaccatgttcatgcctgatgtctatggagaccagaagagggcaccagaccccttggaactgaagctacagaccaatgtgtgctgtaaactagacccgggtcctctgcaagatcaccaagtgcatttagacactaagccatctctctagtacccagacctgtttaaaaatttttttattgggcagcaaggtcttgctaaatttcccaggcttttctttttttttttaaatatttgtctttattttatgtgcattggtgttctgcctgcatacacatgcatgtctgtgtgagggtgttgggtcccctggaactggagccatagatagccatgaaccgctatgtgggtgctgggaattgaacccgggtcctctggaagaacattcagagcttccaaccactaagccatcttttcagcccccaggcttttcttgaagtaccttttctttctttcttcctccttcctccacctttccttcttccctccttccttttttcttcattcttcctcttccttttcccttctttcttcctgtctccctccttccctctctgccaccctctccctctttgagacagggtcttatgtatcataggctggacttgaactggctatgtagttcaagtacgggtattaacttcttagcattccaggtgtgagccacacccagtttgtgtgctactgaggactgaacccattggttcatatcaaacaagcattataccaactgaactatatcgcagccttagctttgaagtttcaatcctcccatctaaacctccttgatgctggattatagctgtgcaaaaatcatacccagaaatatctatagagatcaattatatgttgtgccaggtgtccatggtcaaacaggacccagcccagcactgactcacacagtggcccaggatgtgtgtagcatgagtctagatagatgtggtgaaaactcagagaagggaggaatggcactgggtcaggataccagacttcccagggaagaggccaggagccttgaatggcaaatcactgggggcaaggattagggtggaggactgtcatagtgatctgagagaatgctgttttgttttgggccccaccctgtatccatgagtggttcacagtctgggatactatgccctgaaaagctatttccagggtgtccagagttgctaagcaagatgttcaaggtggccaggcattggtggcgtatgcctttagtcccagcacttgggaggcagaggcgggtggatctctgtgagttctagaccagcctggtctacagagagaggtccaggacagcccccaaagctacagagaaaccctgtctcaaatatcaaaaaaaaaaaaaagaaaagaaaagaaagaaaaagatgttcaaggtgacgcatctgggctgttgctgtggaccagggatctgtaccatcattgcccagctttccatatctagcagcctcctgtctctgggtaaataagctgccacaggctccagggatgcagcatcagagggaagtgacaataaaggcttatcaaactgctatgtaggaggcagccacaaatttcagcggctaagtaatctgtgtctactgttgactttgcaagagctcgggcatctgaaatgccagtgccacattctgcctacagccgtcagggcttttgaaactggggaaactgagtcactagaggaacataaagcactgtgtggcaaaaggtttcaaggcttggatgggggagctgaggctggaagatgcttcaatgtttggacaccaggccatcagaccccccgctggccatttccagagagactaagtttcattttgcagcatgggcaggagttaagaattgcagctgctctggtacagacagggattgtgctggctagttttatgtcaacttgacacagaagttaaagtcatctgagaggagggaatctcaattaagaaaatgcctccaaaagatcaggctgtaggcaagcctgtagggcattttcttaattagtcattgctggggaaggtccagctcattgtggtaccatccctgggctggtggtcctgagttctataagaaagcaagctgaacaagccaagggaagcaagccagcaaatagtacccctccatggcctctgcatcagctcctgtctccaagtcccagccctgcttgagttcctgtcctgacttcctttagtgatgaacagcaatgtggaagtgtaagacaaataaacccttttctccccaaacttacttgtagtcatggtgtttcatcacagtaatagaaaccctgactaggacagggatgcatgaggctcagctgtgaggaccagtgcactgttcagtgactgcagagcctggctttacccatgagcctctgccacttcacaagtacccatgacctgtcccacacatggtatagggaggaagtctgcctttgtccattgcctccccacacagggccatactaatgaaggcactagtgagctgtgttgaagagggtcttttctgaatgtcagacaggtcatactcacctttagcccacatgggtgactttgggatctttttccaacacagctccttgggggacctcaagccaatcttcagtctgctttgtgcctccacttcctccacccacctagtgagtgggaaggtctccaaggtcctgcccttccgtggtgacagagtcatcttccctgcactgccccaccacctgcttctctgttctccgtggaataggttcttgatttctttctattgtatttattgacatttgtgattgagtctgcccccaacatttcacaagagctcaagcatgtaccacagaacacatatgcaggtcagaagacaacttgcaggagtcagtttctaccctgtggattctggggctcaaactcaggtcatcaggcttggtggtaagcacccttacccactgagccatctccatggcccctagggtcttggtttctttcattatagtctccccgggtgcctgttgcacaatagaagctcaggcatgctactggctttgcaactcctagtgaccatcccacctcctccttccaggtcccttctcccaggaagcctggctggtgcaccaccccccaccctcaggttcagctgagccctgcaaagctgggctgtatcatgggctcctgtgcacgtgttgggatacagatttggaagcctccccctgcttctcttccaccttctcttttccatcgggggtgcgtgggcacagtgtcttcttttagattcccctcggcacggctaggatgagtgccagggccttggtggtacagccagtgctccagggggttgtttacagcctgcagtgaatcacccacaacagccccgggaaagctgggctggcctgggctcagggatgaaaacaaggagatcatgacatttattctttagacagagtctcatgtagctcaggctggcatccaactcactgtgtagctgaggacgaccttgaaccctggatcctcctgcctatagcaacagagtgctgggatttcaggtgttcaccaccaaacctagttaatgtgcttctggggactgaactcagggctctgtgcatgctaagcaagcaccctataaactaacttgatccccaactccacaaaacatggtcccaaactggaaatgtagtttaattattagagttcttgcttaacatgcatgaagccctgggttctagcccaagtcctgcatacccagttgtaattccagcactctggaggtagaggcagagcagcagaagttcaaagtcatccttcgctaaagagggagtttgaggccagcctgggatacatgagaccctgtctttaaaccgggaggattggagagaaaacttagtggttaaaacatttgtcacacatgcatgtagatgggattttgggtccccagaacccacataaatgctagatgggcataatggcatgtctaatatcagagctcaggagttagagacagggtcttcctagagcaagccaactatgcagtagccgcatcagcaagctctgggttcaactgagagcccctgctccagaaaaaaacagagagaacaattaaggaagactcctgacaccaaccttcagcctctccaggcacatgcacacacacactcatacacagatacacaacatactcacattcacacacactcacacatatacccacacttactctcgtacatacatatacatataaacatacacatatactacatacacacattcacactcacacacacaccccacacgtacacacaaacacacacacatcctacatacatacacacatgccacacatacacattcactcatactccccacatacatacacacacactcacataaatgcacacttccacatacatacacaccccacatagacacacacacacacacacacacacacacacacacacacatcacatcacatatatctataaaagcctcttgagatgctgggacaagatctcctagccttcctcaatcctagaggagcaggaattgggatttgagaagccatactgggccaggatggagaggacctattctttttaagtccactggttcattaatctcccacccccagccagggcctcactctgggtgggtgggtggggtcttgggctgagaacccaggcatttctgtgtgtgtctctcaggaatgaattattccggaccttgacccctaggagtttatgaggggtgccattggaggcagccatggggtgacttggggctcaggcttcactgaggccaaagcgacagcatatgcccagttgcagaggttgtatatcacagtgagtggctggatgctggcctgaccatctgtgtgtgctttggttcccactctccttgggtttctgcttcctcgtttgacatggtgtttttgtggaggggtggggtggagctggcctcaaaattttcatgggtttcccaaataatgaggggggaccccactagaacaagaggtgtgaattgtccacagggcagggatctgagtattagtgaggtcctgggggctgggcaggtatgacaaacagggctgtctgtttaagcaaggaggggagcttggactaggacactgccggccaataagaccatctctccaggcccagtgtttgctgttggaacaagagccgggtgtgtcaacagtgggggatgaggtggcccttcactgcatacacagactgtccctgaagccagctgacacggccctatggagctcagtgtttccatacggtggggtgctcagagagcacctgcccacttcccaagcctcagcctgaggccaggagcaggggaggtgtgcccctcaggaagggaaagggtccctagtgacagcagctaaggcctacagcatttctccttggggatgctgcacacaggtttagtcttttctattattttaattgctttttatctatttattcaccaggtaagggagtacccaccatagtgtgcgttggaggtcagagttggttttcaccttccactgtctgggccctgaagatcaaacttgggtcttccagcttaacagcaaatgcctttacccagtgagtcatcttaccagcccataggctcagtcttgactctgataccaatttgatggatgaccctggaccaatctcttccctctctcagatgaggtctcagaattactttcacttcctgaaatggaagtatgggagatattatatcagccctttgcccataggaccctgcctcttctacctgatgcaacttggtggctgactcctctgtgtactagccggtgttgccaagggtctactaggtgccagatggtgggccatgagggtgcagctggctctccagctatggtgagtttttcctttagaagggaagccacccgtggctccagactttgcacaggggccacctgtggctccatgactctacagaggatctggagtcacacaaagcttaggtcacatcctgatgctacattggctaaccatgtggtcttatgcattgcgtgccatctttgagccagagatgacgatgcccacccactggattgtggcgacagcacttagccctagcattgtgccttctcgggatacttggaaggggctcagaaagccttgctgttattactgtagccaaggatcctgacaactcccctcagccatggaagaaaaatctctgaccctagcacgggtaaaagaaagtgaatcaagtgcccccaaattgatgggcagcctggggctgcatgggacagaggctctgggaagcaatgattatgcccctcccctttccattgcatcccatccacaccccattaaacttgtagttcagatgtccttagaagaaccccctcaggctggagaaatggctgagctgataaagtgcttgccttgcaagtgtgggaactggaactctatgctcagatctcatataaaaagctaggtccagcagtctgagtgtgtaatcccagtaatggcaagatgggaggaggtggatacctagatctccctagtcagctagcctagcctatataatgcaattctggaccaatgggaaaccctgtctcaagaaaaaaaggtatgtaaggaacaaccccgaagttatcctctgatctccacatgaatgtgcaaacatgaatctggacacacatgtcactctcccccaccacacatacacatatggacatgtgcacacacaagcctcagatctcggctagctatggttgttcagagaaggatgagggttctggctaggtaggcttcctaccatgcaggtggagaaactgaggctcaagtgttaggagaactggtattttctacatctattaggacccaccaagagcccccagcctggcctgtcacctctttgtagacaacagagtaaggaatgaaagctctagactctaggccatatgaaccggagccgtgccccaatctttcaggtccccagcgactccagcaccccttctgaggagcctgagtctagggaagcagatggtgccagagcctgccagctactggcttccctggaacagctgttgcacagctgtagtgcaggggagggtgtgtggaaccaggttcagaaggcagggacccttggcagctcctgcctgagtcacacatcagctctgggagtggtaatgaggggattagggctattactgccgagtgactgggagtgtgctcgctcacccgagcaaccgccagcggcagcttatcccacttagctgtcaagcagcctcacccctgccctcctgtccaccctttgtctccggcctccacatgcctcattagagctggctgggtgtgcctcctcccagacacatcatcgtgcccacagctcttcctgggtccaggtcttgggggccagatgggtagtgatccttgaagctgatgcacacaaagggtgtggcagggataccatcaccatgggcagatttggtcacttaatggggctcggaggccagcagaaccaggaacacctcactatctagggaggaccttcccttctcgacaactgggcctcatgtctttgcttcagctccaatcagcagaaatagagccacatatccaagtggcctataactggcatgtgaggtagaggacagggggtagcagtcataataacagatgacagatggcccaaccttagtgcttgctttgtcccaactgccctggtctgtgctgggcttgttttaatttactctgtcctcaaaacagctctgtggactgctgtaaattcacccccactctatagatgaaataactgatccctaaaggttaagtaagtggcctcgggtcacactgctggtgagcagagcagctgggctttcatccaaacatctggccccagaagcatctctttcaacttcaaccttacagggcttcatgacacctgccccaggacttctctgcttgcatcagctcctgctaccatccttatattcattcatggccatcccatgcatcttccagactcttcttttgtgtcctaagcaattcctcccctgtgtgctggcttaggctctttccatggtatatatctgtcttcaaggtcattgtcctgtgtgactgatctggctcagatacatgagcactcatgaggcacagggggaggagcatgagaacagtggtgagaaaaggaccttggggtcagttccatggcttagggacatgggaagtggccacctctctgagcctctcacacatacacacatacacataaagtggggtgtctgaaagtggggtgtcttcccagcttcccttgaggattcatgatgccgagtttcaaagatcctgcacccaatggattcataagcagccagtgtgaccagtttcaggtccctctcctccacttgctaagttgagccaggacctttcggtttagtggctgaagcccagcaccccccctccctgtgctggaaaggtaggtggcaccctgccgcctccatgctgtcgtcaccacctccaagagtgagaatccagggagacggtctcctggcagcagagctcctgctgccctgcatgggtgtgtttggtgctgccacacccgctagggctgactagaccctgggagtgggtttagggatttaattctgtcggtgcacagcaccttcctgggaagtggaggcagatgaggtggccgtcttagctcctgtgcttttaggtgagaggaggcacaggtgcatggcaggtgcatggcaggtgccggatgctaaggacatcccacagtggggttcttgaacacttcagccagcggcagggtcagagtgcttagggaagctgtgcctttgacatggctgttgagaaaatattcattcagcctcttctcaaatgagtgaaagtggttggctctagccaagactgccctctgtccattcatgcacatgcacaccagcgccttggccagtcttagtggacaggatatggaatgtaagataatgaggacagacctttccatggcgctcaaatctgaaggggagccatggctacgcaggtgcagatgtagcctctgtcccaaactgtccttgccttgggagggtccctgatgccatttccacctttggaaaatttcatgtagccaaaagcacatttgaaattttgtctcagtcaggagggtctgaatatgaaacaaacaaaatagttacaagttgtgtgtgtggtttaattttgagtcagtctgtagctcaaactcctgatcctcctgcctcctcctatcaagctctgggattccaggcaatgtaccacggtgcccagcttaatttacactaatattttaaatgactggcacatacacaaggttcaaaattcaagtttaaaaagaaaaaaacccacagaaacaagcttgggatgctgatatgtgatatcagcactcccgaggctgaggcagaaagattgccctgagttccgggccagcttgcaatacagcaagagatcctatctcagacaaacaaacaaaaaaccccaaaccaaccaaacaaacaccctccaaaacaacaactacaaaacatcaaaacagggtcaggagatggctcagtgggtaaaggcttttgacactgaacctggagacctgagtttgaatccttgaacctacaaggtaaacagagagaacacacacacacatacactctctctctctctctctctctctctctctctctctctctctctctctctctctctctctctctctgcaggcagcaaagagtccttccagtcctccatttcctctctgcaaaaagaggcatccttatttcctggaatatattatgtatgagccataaccttcattattgtccacacccatcgtcttttaccatgtgtgtacatccttctacccgcctttccatcctggcagctgcatcttggttactgctaggcattttttggaaacagtggcctcatccctagttatggctatccaggacttccttatatggagggaccaggagttatttagcagatcttattgatgcacatttagcttgtttccagcccttggcaattactttaaatgttgcaataaataatcccccacatgtgctgcttcagtgggtgcttgcaaacctgcaagtggaggccctccgggagaggtgtgggtttctaaggtcctgattgggtggagagggtcacaatgccttccacagtggtgtccccaagctgtaccagcccagccttgtctgcttgccctgcttccactgtggctttgccagcaggcatgttatcaaacggagagctttgccaatctgatatttgaacaaggctgtgtcagtgtggtaagaaactttaagacagtaattatatggtcggctgtctgttgagctgaaggacactgtgccaatcacgtggcacacgtgatatggtgttcatttctcctgaaggaccactcactgtagttagcagttgcctattccatacaggaagaaactgaggctaagagaagtcatgtgtgatttcaacctaggtcagctgacctaagcagccctgctgctcttgccctgttccaggcgacctttcattgctaggcttctgaaggtcccaggctgagggcaccagtgccacctagagctattgctcctcaccagggggtgatggacagagatttggtcccctaaagccttacctgacatggagccttccctgacatgggccccctgaatctcaggtccgtcttcaggacagagaaggaaggctccatgggaagtgggcaggtcaacatcacctcccttggcaactgcagggttcatttccacgtcctgacttccttggcctctccctgaggacgtctctccctgcaaccatccccagtgccctcccaaggagtctatccacatttagcccaggatccagggtgtggcccctctgctctctgatttcatgccctgtgacattatgcctttatagacacacctactcttcttccagagctgactatgtccccagctggaggagactccagctgctaagaggaattctcattgaacccaaggggtgactccatagagtcatcatctctatgaccctaaatggctttacagaaactctgaactctgatcctggccagcatgggtggggcaggaggctctgtcaatagtgggagaaactcgttaagtgaatgtcaataggattaaaggcttcaaagatggtctaggagacagagtgacatcacctgacagtaggaaaggactccctggggcatgtgggggtggagtaggggtaaatagcacagaggtggggaggagggagggagggaaggagagggatggcttatgagatgagtaaaggagaaaggcaagccacccagacagaaggtcccagaggagagaaaaaaagcacagaaggctggcaagatggcttactggacaaaggagcttgctgccaagtctgaccagttgagttaaattcccagaacccacatgatagaagaagagaactgaattgtgcaagttgtcctctgacttccacagccccatggtacatactccatccccacaaataaaaaaataaataaatgtcattaaaagttaaaaaaaaagaaagcatgaaagcacaagaaatgagaaagagcatgtagaaaacaacgagaggatgatagaaagatttagaatccagagacacacccaggatggtggagagaaaaaccagaggacgggagagaggaatgtgcgtgcagaagctgaatgtgtctgtagacagagggaggaaatgaagattgagctactctactagacatgtcctggcctggaagccttcttaggaagctgtggacagcattcccaggaactctgagtggcaggtttgtcactcaggcaagaataagacggattgaacatccacatggtgtcaagcttggctatgggtgtcagggacaggtagggaagtggcagagtgaggaggagatggcctctgtcccgggggtttataagcacacagggcaattgtcatgggatggtcagaagagcccctgaccctggggacccataatgaggtcacatggcaaaagctgggagcaaatgtagtcctagacccttgttctatggaaccacagtcaagtgtgtgtgtgtgtgtgtgtgtgtgtgtgcacatgagtcctcagcccactgacacacatgaggaggtgtctagtgtgagtaatggtgggctgactgcctttcatctggagtttcctaggctgatcacaaaggttgggggatgaagggtactcaaccaagactggggtctgatccttataggtagctgataggtaccagcttgagctccagctctgccattgtttggggtaccatcttgtcaagggactctcttctccaaatcctctcctgggggacaatggtagagtgacttagggattagcaggaagttcctgcacattgaagcattccatcagtctgacttgccttgtcccaagttcatggacagatcaataagatcccttggctacccttgaccctaggaggaagctgggagaagcagaatgtatgggaaagagaattggtcccatctcctggcccttcatcttcagagggctgagagtgggagaggaagctggagtagacaacgggaatccccaaggctagataccacccagccctggtgcacccaggaccaccctcttgaagtgcttagggcacagggggaattcctagagctgcctacctcctagttgggtccagcatctctgccaggtccaggctgctggttggcatacagacaggcaagccagcaggcaggctggccggccagcgggcactgcaggagggtaaattccacatttgcatttggatgttcctggccccaagggccgctgacctttacagctgttacttccgcccctcttccaggcatactgggctcagccatgctggccatccaatgccccagcctcacaggtaggtgtccagggccctgggaaatgccctgcagacccccagcctaccctcctcacttatcctgctgtactctgacacatcagctgctgcccaattccctcacaaccccagaatcccctctgccccccacagcgagtccctgagggatgcccaggtagcttgggcccttggattagcaatgtcaaggagtctttggtcgccccgcctgctgtggctggtgtgacatctctccctggaagaatccccatctatgctgagtgacagcagtgttgagcactgtcaacttctctgggctcagcagtcaggcctacacctcagagagtagaaatgcttcccagcccacctggtccccaaggactcttgtcacgggtggcttggctagccagctgactgagcaaatcccataagattttataaattaaaatccatctcccagatggctcagtgcagaagacttcttgctgtacaagcaaaaagacctgtgttcaaatccccaaaacccccataaaaagctgggtgtggtagagggcacagagtaatggatggaccaggacacccgatggcctggccatttctctggcctctgaccatatgtacatgtgtgcacacttgcacatacataacacacaacgttttttctttccttaaaaacctctgtattttatgtgcatggatattttacctacatgtgtgtttatgtaccacatgtgttcctggtacccgcaaaagccagaagagggtgttggatctcctggaattggatttagacggttgtgagcaggtgctgggaatcaaactcaggtctcctggaagagcagcaagtactcttaactgctgagtcatgtctccagccctcacttacaaaatctaaaaacaaaggctatcttccagccctctgtgagtagtttctctgctcagcccaggaacacaaacaggacatgactccttttcctcagtgctaaggattgagcctggggtttggagaatgccaggaacgttctccagcactgagcgacagttcctgcccaattcattctttttcaaaataaacatatgattatctttctatgtattgactttgtgtggtgggggtggcatggtatggcacacatgtggtggtcagaagacaactggcaggagtcgcttccctcctttctcctactgggttctggggctgggactctggttgtctgtcttgggagccggtgactttgccatctgagccatctcactggccctactctgtttcttcttctttccacctctctggccagggtgtgtgtgtgtgtgtgtgtgtgtgtgtgtgtgtgtgtgtgtgtatgtgtgtatgtatgtgtgtgtatgtatgtgtatgtatatgtgtgtatgtgtgtgtatgcgtgtgtatatgtgtgtgtgtatgtatatatgtgtattgtgtgtatgtatgtatgcatgtatatgtgtgtgtatgtgtatatgtgtgtgtatgcgtgtgtgtgtatgtgtgtatgtgtgtgtgtatgtgtgtgtctgtgtgtgtctgtgtgtgtatgtatgtgtgtgtatgcatgtgtgtgtgtgtatgcgtgtgtgtgtgtgtgtgtgtatgtgtgtgtgtatgtgtgtgtctgtgtgtgtctgtgtgtgtatgtatgtgtgtgtatgcgtgtgtgtgtgtgtgtatgcgtgtgtgtgtgtgtgtgtgtgtgtgtatgtgtgtgtgtacgtatatatgtgtatgtgtgtatgcatgtgtatgtgtatgtgtgtgtgtatgtgtgtgtctgtgtgtgtctgtgtgtgtatgtatgtgtgtgtatgcatgtgtgtgtgtgtgtgtctgtgtgtgtctgtgtgtgtatgtatgtgtgtgtatgcatgtgtgtgtgtgtgtgtgtctgtgtgtgtctgtgtgtgtatgtatgtgtgtgtatgcatgtgtgtatgcatgtgtgtgtgtgtgtatgtgtgtgtatgtgtgtgtgtgtgtgcacgtgtgtgtgtgtgtgtatgcgtgtgtatatgtgtgtgtacgtatatatgtgtatgtgtgtgtgtgtgtctgtgtgtatgtatgtgtgtgtatgcatgtgtgtgtgtgtgtatgtgtgtgtgtgtatgcgtgtgtgtgtgtgtgtgtgtgtgtgtatgtatgtgtgtgtgtgtctgtgtgtgtatgtgtgtgtgtgtgtgtgtgtgtgtgtgtgtgtgtgtgcgtgcgtgcgtgcgtgtgtgtgtgtgtgtgtatgcgtgtgtgtgtctgtgtgtgtgtgtgtgtctgtgtgtgtatgcgtgtgtgtgtgtgtgtatatgtatgtgtgtgtgtgtatgcgtgtgtatatgtgtgtgtacgtatatatgtgtatgtgtgtgtatgtgtgtgtgtctgtgtgtgtatgtatgtgtgtgtatgcgtgtgtgtgtgtgtgtgtgtgtgtgtgtgtgtgtgtgtgtgtttggggagggactcgatgattatcagaggttgaattacctgtaaaagatatgctgaagtgccttcccccaatacctcagagtaggctcacatttggaaattggtgttgagcatggaagggtgctgaggtagggtggccctgattctaatatgcatggtgtccttaggaagaacaatacaaagacattgatgtaagaagaggatggcacatgacagtccacacagactgaagcctcctcaaggctccaagtcagggaacagcaaggagggctaggaaggggtagggaggggttgtccccgcagtgagccttgagggaggccctactaggactttattgaacatttcagaactgggaggtaatccgctattgtttgaaggtgcccaggttgtcattagttacggcagccctgagacagaaatgcaaccagggacaagggcctccgtctgctggcgcttctgagagaatgagggaagagatggcaacaatccaggaggttagcgggtgaaaacacagcaactgggggctgagagagcagtcagcctgtacatgtttgctcctgcctggcactggtacagagctgtttgtttcttcctgtgttgcccaggctggcccagaattcctgtgctccaggctctcctgactctacgtcccaagagactgagcctgcagaagtgggccacagcactggcttgtgacaggccttaaggcaaaattcacctcgttttaccaatcccaatgccaaggctgtgatgccattttatagatggggttcagaaaagttgacaatgtacactggtctatggcaggggaagacttgaactcaagatttggactccagaccccacacttttaactagtactctgtgccctcagtaggaagcaaacaagggactaacagctatgggtgggaacgacttggagaaagaaccaaggactctttccatcacaacctggacatgcatcaccttcctctcgctcagatcttccatggctccctgtcttccaagtccaagcttcctcatccagcacacaaggggtcccctacacacacacacacacacacacacacacacacacacacacacacacacacacccctgctcctctccctgctgcagctacagagaaaccagctggcgactggggaagcagaaatgctgagctgagctaggacacctgtttttccacttatgaatgtgacttctgaccctggtacctcacctgtgaggcaggaatgggaccaggacaccatagttgagggaaggctttgtgagacgtgtaagctggaagttacctgccctcaggtctccacatgggcttctttctgtccttattgatgaggtttccaggctggccttgacatgctggggagtctccttgctactgctcacccatgcctctgactagatgcttttcccagaattctctgctctccttcaagatccaccttgacacatcctctgctctggctacccccacaccaggacctctcagagacatctcctagcatggaaacacatctaccagagatattatatccattacctcatcctttcctcctgggacatcggcagggggcacataggtttcttgccttagtttacctatctccgaggtctagcatgcctggtgtaatttccctacccctgcttccattgctttttatcatttgtccatttgctctctggctggtctccatggctccaactggctgccctgccacctcctgtcaaccatagcctcagctgggggtaagggaaggggcagtcccctctctccacctgacaggcagattatcgagctgtctttcccagaagacagtgggtgacaagggtaattagcttcctgccaactagccaccctgatgatctggctgtgtcctgggagttggtgacaactgtggccagtgtctccctccctattgtagttctgggtacagggaaccttgtacaagccccaaagtacactaaaggaggctggccaaccacaacatgatctcaggcctggcttccagtccactcctgttctgctacacttctgattgaatcacttctttaaaccccggtgcccgttgtacagttgatctggtggggcagtggcctggaggacgcgatgcctggaggagcccctccattgggtgatgctgtaaactctccactacccatagtctgcccattgcctcccacaccacatgagactcacactacagtttgtacagggctgccatggccctggtggattaggctagcctcagttaatcctctcccttttaccctcctgctctttactctgtggctgacaaatgggtgttactggaagttgaccaggtgggattccagaagaaacatatcttgaaaagtaagacacacactgggataagtaaattccttttgccctcaacctccatttttcttgccaggtattgtagacatgatccctggaggtaaagtggccattgtgctactgcaagatagaaagtcaacactgaaagctggagacagcttgaaaccagcacactagccctggacctttacctctagagcccctgttatgcaagtagaacacagctttcaggtgtttttgacttgagatcaaatgtgttctggctatggatgtccccattgttgtcagtccactgtaggcctgtgcttgagtgacaccactccacacctgtggatgggctgagatctcaggatgccacaaagtcccacccatctgtccctccagtgggcctctgggcagatgtctgctcattcccctgagacctaatcagagaggacagtgtggagaggaagtcaaggccatccctcccttgagcctgtagaatatggctctcatttgcccagccagccataccaacatggccaagtgggacgtcctggggttgaaaaagccttcaggccagttgtccctgtttctgtgggcatacactgctcagagggaaggagcccaatcccaacaaggaggatcaggagacagccagggctgaaacttatggaggagaaagacaaaaagcagagaggatgctgggccttagttcagtaggtagagtgtttgcctagcatgtatgaagccccaggtttagtctccagcaccacataagccaggcctgatgtccattcctatatcccagcacttaggaggcagaggcaggggggtcagaagttcaaggtcatcctcaacagcataaaaattcagggtccgactgggatacataagacttattttaaaaacattttaagccaaaagggtatctcagagagaggaaccagtctgtgaggaggccttgctagcccagagcgagggacaggtgagagagaagttagtgggaagtgagaggccacctctgggcctgatgagctgtattgggttttatatacaggggcattgagggatagacagagagaagcaggcttgggttagaattactgcatccctccctcagcttctcctgactcaagattctgagtctctggagctgcagttaaaaagcaaacaactctgtcaattgaatgttggccacatggagatgttcatggggcagtgactatggaaggtctgtggtatccttcagtactacggtgagactggaagaggtaagacagcccctaagttcaaagctagccccacacagctcttgacatggactgtacctaccaacaccatcagggaggtagtgcctcctcttctcctgtctgggctttggacacaaagcatcatctgagagagaatgccatcattgttcatggattatgtcactgctgatctgaaaggggactctgctttcaagggttggggtggggtggggtgtcttactcagcagacctttggctctacatgtctcccaaagtccagggcaccaacagtttgtgtatgaaaggcttgagtattcaacttggcattattagatggtggagtgggacctaacggtagtttttaggcacacactggaaggggagagtggaaatccagcctcctcttatctctctttccttctggctacaataaagtgaacagcttactcagccctgcattgcctcatcacagggccaaaggcaacccagacctgatgcctccaaaactgtgaactaaagtaagacttttctcaagttgatcgtcttcggtgttttgttatagtaacagaaaactgacatgttgagggtaagacaaatgactggacttgtctgaccctctgtagaaagcagaaccctgtgattcttcaggcccctgtcttctctctgacgggtccctctccgggctttcctggtgcactagccctcagttccagagattcttgtgaattaatgcaatatccacgacgcctgccacagccgagggaccttttgcaatgtttaaacagttcaaactactcttatatttgtatatataaatttagatatattgtgcatgaaatatgatacttatttttttactgcttcatgggtgctgaacacaattgctaattgttttacaaaaaaaatgatcgacaggatttcactaaaatttcaaaaaattactaaatcagatttgatttcaaatgaggatttcagctatcacattaatttctattttacttctttgtttcaatgaataattctaaatgttagaagaaatatctttgggggacaatactttaaattttcattttctggagagatggctctctgattaaaaatacttactgcttttgcagaggacctgaatttggttcccagcacccatttggtggctcacaacagcccacaactctacttctagggaatctgactcctataggtacacatatacttctaaatcaatctttaacaattccatgcactataatttatctttggttatttttgtagttattaggaatcgaacccaggaccttcagaaagcaaggaaagcacaccagcactgagccctcctccagccccatagtttatattttggcaaaactctattttgttcgattgttaccatcactgcaattagtcatttttggtgaaatgaagacatggacattttataaaataaaataaaaatttatgaattatgtatcgcgctatcgcttgtctaaacacagccggccctgtcagtgggctacccaaacaacagtttccaaacatctaaaaaccaaggccttgcacacagtcctgttttgctactatgaaggtgtgtatgtcgaggtaagagaagagaacatattttatttaacagcttgtttggtttgggaatatttaggcatatggtatgtgggtcttcatctgtagtcctaagaatttcagaggctggtctggattttttttaaaaaatagctttattgatacgtaattcacaatctaacaagcccatccatcttggggctggaaagatagaaggctcagcaatttggagtgtgtactgctcttgcagaggacccaagttcagatcccagcacccacattgggcagcccacaaatgcctgtgactttggctccaaggcattgagtacccattttgatctgcttctggcaactgtacacacacgtgcacatacacacacaagtaaaatttaaaaaaaaaatctaagtgttcacccttctaaagtgtatccttcatagttttcaatacatttccagccttgctttaatcaccattaatcccaattaaatcttgtggccccgtgtgagcatttgttcctcatcttcttgaactctcaagcgtgcttcctgcctgtagagatttgcctgggtggtacagatggatcacatgccgtgtggccatttgtcttttcttttccttggcgtggtgttttcaatgttctttcattttgtagcatgtgcccatgttccttttcattgctgaataatatttcaccatgtggccacatccattcatcatataatagacatttaaattatttccactttattttactactaagaatactcccatgcaactctttgggagacatttgttttcagttaaccggggcttatacctgggagtggaattgttgaggcatatggtaactgtatggtttattgtttgaggaactgccaagtgggttttccaaagcaaccatgctgtcttgcagtcccagtagcagtacacggaagtcctaatctcatcccactcttgccagcacttgctattgtctgccttgctttatattccagccaccctagcgggtgtgaagtggcttctcattgtggcttttgatttgcatttccctggtgagttgtgcggagcagctttgtgtgtgtttattggccatttgcagatctttggggaaatgtgtattcaaatcctttgcccattttttaattgggtgattcaggtctgcatttaatgctgccagggtgcctccagcttgctttgccagcagcctgggccgtttgggatagtcacactcacctgctaacttttagagaggcacttgatgggagtccttgtctagcatgtgtaaagccctgggtttgatccccaccacctcatgaatcaggtgatataacctctgacccccaagcttgggaggtggaaggcaggagggtcaggaattcaaggtcatcttcagttatatatggaacttgaggccagcctggggtacctaagaaggacctggggagaccgctcagtcagtaaggtgctggccatacaagcattaggacctgagttcgaaccccatcacccatgtataagctgtggtgtgtgcttgtgatccaagtgctaggaggcagacagggggacctctgggtttgctggtcaagcagtatagccaatcagtgagctccatcagtaagagaccctataccaaaaagtaagataaggagctggagagatggcttagaggttaagagtactttccgtgctctctctctctctctctctctctctctctctctctctctctctcacacacacacacacacacacacacacacacacacacaaagaaataagaataaacttaaaaaataaatcttaaaacaaaggtagggagcgactaaacaagatacccagtgtcaacatgctccccacatacaataatcaatgtaattaaattacgacaacccccccccaaaggcagcttctgtgtcccagggtccttactcttctgtcatgcttcctccaggacccctctcatggagtgatatatggccatgttgggccagactcaaagaggccatggctaaggtctgattagctggtgtggtccacctgtctccccaggcctcagctgtgcacacctgtgcaactcagcttccccactatcaatagctggcccctttccctggagcagagctcttggggttacagctctaggttagggatggttaacagtgctaattggagggagcccttggggtgttttgtaaaaaatcatccttctgtaacctctcctacaggatcccacggccccaggacagtttatggcccaggcagcctatgcatctcagagcgcagagccttcacgtctggtcatccctgtcctcaaacccagctatccatctatttcttccttctcttctgggccacccaagcctcctccctctttccccaagtggcgagtggcgtgtgactgctcaagggatgtgagaagcaacgggaaagtgacacaacaccccttaattactgtcttctgtatcccagcacctaaatttagccacagagcctgggcactggggacgaaactcctccttccccagtcccctgtccttagggaagagagatacagataccctcccagagcagggctggggatggctcaggatacagcagaggccagtgagggcactgagctccaggagggacacccccagtgtaaatggcaggtggcagctggggtcacaaatcaccagagagcagaatggcactacaaccctgacaggaagtctggggttggggaggtggaggggagaaggggtcagagtgttagggtcacaggatccagaatcctcctcatgttctcagcttctgtactaccacttgaaggctgtgcagcctctggcaagtcagccagcctctttggacatatttgttcatctgagcacagcgcaccacctaagtaaagtggttgtgagctttcattaagataccacaggtagcggtgccttggtggcatatgcctttaatcctagcacttgggcagcagaggaaggcagatctctgtgtgttcaaggccagcctgggtctacagagcgagttccaggatagactccaaaacaataacagagaaaccctgtcttgaaaaaaaaaaagataccacaggtaatacatggagcaccgagaaaacacagatggggctgggcgttggtggtgcatgcctttaatcccagcacttgggaggtagaggcaggcggatctctgtgagttcgaggccagcctggtctccagagccagtgccaggataggctccaaagctacacagagaaaccctgtctcgaaaaaaaaaaaaagaaaaaaaaaaagaaaacatagatggggtcagtcatgatgcccatctaagtttcatgccaggtaagccctgtaataggacctaggtgtctagactcctcctccagtgctcatccacgaagcccccattccttccatagttaccccaccctcctctctttcttttccaggatctaatgcagcccaagatggtctgcactcctattgaacttctgctcctcctgcctctacctctcatgtgctaggattacaggcacatactctacaccctgtttatatggtgctggggattgaacccaagacactgcaagcactctaccaactgagttacatctccagtcctgcagtgattcttacatggggacacacaggcagaggcaggagaattgccaggccctagatcaccagccagctggcagcaaatctggcctctatcggcaggtgccagggggagctgcctttcttccaggcctgctcacagctgcccactccaggaagccctccagctgccttcctgcaggctccccagctgcaggggcccattttcagtcacatgggcctccccagctccaataattctagaaagagacaccttatctgttgcttctgtgagtcactggggttcaaagtcaccagatctttgtaaaaagaaaaaaggaggacacagctggagagagctggaaagagagtttgagtgaatgtgtgcctggctagctgtgcaccccagggatttgacagtgattttatctaggcacggtggggtcagatagggattctggaatcaggcgggtccaatctgggtctcaggtctcggttcctcatatgcagaattgggtagtagagccagcctcctggggcaagaggcagatggagagagataagccagcaggaccagttctcctatcctgaactgtcatggacaacaggttctcaatcagagcctggacaaagccgcactgaagtgtggcaggacctgggacgctatcatacccatgtaggaactgctgtgtgccagccttaaagggcctccattggcaaggtctgggaagctaaagccccttcactgctctagcccagatatcccttgccaccaactccaggctgtcaccagccacatggagtcgaatttaaacctgcaggcaggcatttgcattagcctgtctcataaccaaaggaatcagggcacatattaagcagatcttaaattcagcctgggcagtctatgctccaaacccctgtcggcctctgacctgagcaggatgcagacatctcccttgacctagagtcaccaagcccctatggggagtgggaggtgatacatcagagagtaaggagccacaccccctcctggtcatgtccttcttgaagaggcctgtggggtctgagtttcaccggtgacgtgaagtcactcctctgcagtggcgtgctcatgttgatgacgtacaggcagctgatgtgttgtgggcaggtttcaggcaccacgcactgccctaaaatttgacatgttgagtcaccccttgctcatgatgccttaggagatgtaattatgaataggaggcctgaccaggtcaaagcactggggctctcagaactggtgggagagtggggctccacccaggcagtctgaatccacttgtttgttcaccctgtaccccttcacatccaaccatgctccctctgcctcacctctgagacctgcccccccccacctgggatgtgctgtctattggaaggtgaatgttgggaagggaggtgtgtccccccacacacaccctgagaatgcccttactagctccccagtcttctctaaagatactgtgacctcaacaaaagaaaacacaagaatcagagagacggcccaagctgcagggaaatgttttctcagttgtctccagttccttctcttgctcaccatctagggatcccgaagcatagacaggtgcactggccttgcacagaatatccctgggtgacactgtgaaaagttgtccttgtgaaatggcagaatctaggttttcatcctagccaaggagaagagacatgttcacagtcctctcgtggaaagctgggtactgtgaggggtgccctggggtcttcattacacggtggctttcatgattagtattgtcatagggtgatcactcaatcccatccactcagggagggacaaaaggaaccagcaagggtgtggggagtgaatgcacttgctgtcaaagactgatgacactgcgtttaatccttgggatctatgtaaaaccttggatgtgatggctcaaagctataatcccagcagagatagatggcagagacaggagaatcagctggcagctcatggccagctagcatggaatacacagtttcaggaactgtggtgatgccaggatgctaaattctggagtaggaagacaaggctgcctggggagaagactgccctggcacggagttctctccacatcatgccacatggtcaggcgtcccaatgacacctccccagggaagattctggaaaggatcaacatctgctaatttctcgtgtggaatcgtatagcactctcgtggtgcttactagatgtaaaatggcctaggagcagaatcccaatatataagggctcttgagagagggtcatgaatgacctgtgtgtactcaggatacagtcatctaaaggagatagaaaaaccccaaagcaacaatagggcaaccattgtgggttgttgttgttgtttttggagggggagttctccgaagtaaacagatgtatctgcttcaggtagtgcctgcatcatcacttgtttcttgatcagcatcttacatgtggcttctaactcagggtcacaaatggctgctccagttccaataagcccgtgcatattacaaccagcaaaggagagacaaaaggagatttataccccacaaaaggagatttataccccacagaagaactgtaaatatcttaaagggaaaactgggatatgcagtcttcatttcaggcgactttgtgcccagctaggcatcaggagttcgacgggaagcatgcttggaaacagctggcaacctctggaatcccataatctgtttctgttccacaggaaggctgctgtgtgtttcctggcactatgcccccagcagccttgaatcactcactctttgttcttatgcctttcttgttcttggacattagtccaattctccaacacgatcccagactgctgtaagagaaagactctgcgcgcagcacaaagccttccctctggcctccaaagccctcgacctttgggacctgtcgtctgccacagctcacctctgccccaccctctgggccagtacctgccaagactcccctcctcacccttctgcaggactccaagctgaccttggaggcccactgcaggagatgcctcgtgtgtgtcttcctcagtctctagggagaatcgactccctttctctggcctcccttgggcttccggagccttccgtcatctctctatttatagttagagtcaggtggctctggcctccacgttgctgggcttggctggaagagcaggttctgtcacctgcctgggaaagctgggattttccaagacagtcctgtgtccccccctcaccatgacaatccccaggagagaggctcccacaccggggagacccttccctcattcatactgatagctccttgatccttgctttgtcatgtgtgcctctcagcttgtcatctctgagagacagctggagcgcattgtgcaggactttacccctctgtcatcaccctggctttcaggcccagagaccagcaccctcctgtgcctgtaggtcagaactccacactcctactctgggacctcaagtgagttatcagtcctttctgagcttctgccattatagctgactccactctgatctaacacattgaggttcccaagagacccaaggacagggataataggccccaggttcctggggatttcatatactcctccttccctgacccttggaagttgaaaggaaggactgttgtgcctttggacttggtcccaaggactggcagtacccagcctacctagcttagagatcagagaaagccactctggctgagggttctgagggcattgaaactaacaagagaactaatgtggagcgcctcctagtgggtaccaagagaacatcttcttggccagcctgtggtccaggctctgagcctgaagtcagggtccatgctgagcttatcactcactgccaactgggacaaatctcatctcattcagcaaatctcagtttcctcagtctcccaaactgagatgatacccctcacaggaccacaccaaggcttccatcaggagacagtagtgtttcccaggtccccaggggcagggactagttggagaccacatggagctggtagcaaggacacagggcttctgagttgtcactgggttctctctgggtgctgttttacggcgactctggtatattaatctctccttccagctctgggcattctcagaagttttagctcttattaacatacctgtcccggcaacaagcttacaactgtatccaattaaccttcctgccaacaacgattcgatgtgagttctttgtcagtgttcacagggatatctctgctttccctaatcctgaaaaacagaagtactgtgcgtgagctacatcaccgtggccctgtggctggggtcacaagacactagcttctggggagaacttggggtcttccagtagctgtggctgttacactgactggaccctaggtaagaaactgtatggttggattgtgtagggagacaaggcctctttgtgagtgccagtggatgtaaaagagatttgacacctcggggtggaagggaactttctgaaatgcatgctggatatggtaacaatattggattcctttgtgttgttgaagttgacagtgggtgatatagccccgggacttctgactggacctgctgctgagattgcctggagctctgtattaagctgtgtgttctttgggtggaggggggctggagatgaggttgaaagtgcagttcccccctcccttaggatgggcctctcttacactgaccccctgaactaatttctgatgtcctggggaaatcgggtgaccctggtggaggcagggtctgaggatctacaggggatgccttgccagcttttactaaacaccgattatgagttcctattcataaccctatagacagtctgactggatagtggagaggaggcatggtccataggctggcaggagaacagagcccctgggaggtgggctgagactagactaggtgtggggtggagtagctggggacaagatcaccttccctacagcctccacccaggagtagggaaagcaatgagggcaacctggagccagcagccagatcccaggcctgatgccaccttggaggtggacagacagagtcagtcctgagaggcccaagtcgctagcttcagccaaactggctttgaatcttctccacactctccctcccactccctccgccctcaccagtgcagttctcctgcttgtcacctgtgaggtgtacccccatgtccttgcccttctgtcccttagcctgggtccaacttccccttgcgtcccccagggctctggccaacactacctccttttccaaggctcagctccaaactcctctctcttttgggtatctcaccccaattcggttctgtctcctggactgggagcctggtgggacctctgcccacaccaaaggctcctagcctagcctaatgccaaccctccctgaacaggctctgttgaagttgcttcttctgttttactaaggacagtagaaggctgctccggttttcatggagctgcagagctgtgtgcctgcatgggatttgtgctttagaagttcactaggatggctggcagaggcagggtgagggcacagggcttctgtgattgctaggcagggaggctgtaaggggagggggaggggagggcttctcacagtacagcctttgcttgatcagaggtctctgagcctggccctgcactcaagtcatgtgcctgactcctcactttctacccccaaccaggccaataaaagtcagattcctcagatgtgtgtaataggctctccggtgccaggggcaggattttttttttttttgtaattttttttttattagttcaaattaggaacaagcttgcttcacatgtcaatcccttctccctctccctcccctccccccaacctcccacctgtcccccaccccatacaccctccactccccaggctgggtagggccctcaacgggggctccccaaagtccaccacatcatcctgggccgggcctaggccctcccccatgtgtccaggctgagacgtgggatgggctctcaaagttccttcttacaccagggaaaaatactaatccactattaggagccccacagagttcagaggcctcctcattgacatccacgttcaggagtctgattcggtcctgtgctggcctcccagacagcagtctggggttcatgtactcccccttgttcaggccagctgtttctgtgagtttcaccagcctggtaccgacccctttgatcttcattcctccctctctgcaactgggttccaaagttcatttcagtgtatagctgtgggtgtctgcctctgcttccatcagcaactggatgagggctctcggtaggggtcaggctggcggaggagggggaagaccaggggcaggattttaaagaatatatatatattctttaaatatatattctttatatatataatatatatacataatatatatatatgtatgtatatattggttctttgagacagggtttctctgtgtagctttggagcctatcctggcactcgctctggagaccaggctggcctcgaactcacagagttccgcctgcctctgcctcccgagtgctgggattaaaggcatgtgcaaccaacgcccggcttaaagaatatttttaagtgcacaaaaaagtcacaatgtacaatttatcatcttagccccacccctcctttagagtcaagaccttgttttgtagaccaggctggccttgaataaaagatcttcccaggtgctggaattgcaagcctgaaccactatgtcttgggttcatactgattgttttttaggacttcatttgctcagactggcttcgtattcactatgtgtccaaggatgaccttgaacttctgatcctcttgcttctccacctcctgagtgctgggtccactatgtgccactatacttgatttatgcaatgctggggattgaacctaggcccttgtgtatggtaggcaagctttttaccagctgagccaggctcaattttaactgctttttgtttgtttgttttgtttttgacacagcgtctctatatgctgctctggctggcctcatactcacagagatctgctgcctctgcctcacaagtgctgagattaaagcgtgtgccactgcacctaaatgtttaatgttttttgaacatttattttatttgtgcatggggtgggtgagtgtacgaatgtatgtgtgcccatgcatgccatggtgtgcatgaagattacaggacagcttttaggatttggttgtctccttctccatgtgggtcccaggactggactgatgtcacacgattggtggtggcacttgccattcggccagcccttgttttgtgttcagtgcagtagtaaacagattcaattgtgcaccgggtctctggagctttcctgtggtgcaaggctgagtctctgcacctgctacacagagcctcctgtcttcccattccccttccctgcctttgccctgccttacgtgtcagtgtctataggagactactttctgcctcctctaagggaatcctacactatctgtcttttgtgactaatgtctatacattttaatcttcataaagctctgaggtatttggtgtatgggctcaagtttgggaaccagtgacttgtcacccacgctgacagtacactcaccctgtttcttgcccttagaagtaaaagtaaatcctaatgaccctaagccttgagcgaggattccccgtgggtaattttctctcagacaggccatcaaagtctagtctagtcagatcaggctaagaacccaacaccccaaattaggattaattttcatgacctgcatttttgtgatgttttggatgctggctactcagagtgtggtcctgcatcccttggagctggttagaaaagtcctcccaggtccctcctccactgcagcatctcaatgagtgtgttagccagctcctcaggggcatggcgaatgcgggaggggagtctgggagctgggttaatggagaagaggggacttgcaaagagttggggacagggcctgacagcagagccccatcccttacccctacaccagaagggcagagaggcttgtggtgagtctaggctgatgggggtgcttggcctattccatggccagtgttgcctttgaatcgatggtttctatatgcctgtcaaaagcttccttgtaccttagcttctgatcctcagccacgggtctggtgtccagcaaccctgggcctcagctacaaatccccagaactgtaggaacatggccttgaacttggccttctctttaaccatctgccctgtctataatcctcccagcagggcacctaatctgctgaggcagtagtagctgccctattcagtcatacctatcataatggcttacagagcaacgaggaagggttagcagtcatcaggctgcccatctctgacagaggtctaggagttctggcacagggtgagccttggaatggtcaaagactagtgcaatgtcctacttgtagtaagtgcccaagttgtcattggaacttgaggttctttctctgtcagggctgaggacctcttcctggcacctgtttttgctcttttgtcctttccaggggacagcaccatatgactgttagatgttggatgtaggacttgaactcagggctatgcatgcccagctcctgaattcttaattgctgagcccagcctcttcaccctgttttcagacaagaagcagcacaagccagcctgagcgggagagaatccctgtggactggctttcagccagcctgagtccccctgggaccttcatctcagcagtaaccatcactgatgaagcctgtcccaggtgccacagctgtagtctgggaggctcatgagctcagcagcacgaggagagatggaaagtgacaccttctggtcccgagactctgtgctgggcggggtggtggtggtgcagattggacacctgggcctgggaggtggcctggtgctgcagctgtcacatcaggaggtgtcaggaatgaaactgacagcgtgggtggaggtacttgccctcccaggcaccgtgggatgcccatcacagccaggacagaggctgaggcggggcaggtaggggtgcagagcacatgggacaacccctggctagccaggcatgacctgtgctgcttgccacacgatgctaggaggcacaggaagtgacaagtgatgattgaaacggcagctggaaccctccctagctgcaaactgtgatgagttacttctcctggacttcagttcccgactctaatggaggtggtaatggtacctcttgccctgctgagagcctttgggtcaccagcatacatgaagtacctagtgcctggcacaccttctcttgtgggttggctgagttgaagagaagcaatttacacctggctgctgtgaggggcaggtgaattacatatgggagaaaaaatgcatggtgccaagtgtacagcaagctctgtcagtaattggtattattattaggaacaggccagctacataatttgcagagctcaatgcaaaaggaagtttggggctctcacatgtaacggattaaaagctccaaaactgtgaggccagtaagattggcatagtagataaaggtgcttgccatcaaccctgaaactaattggatccctgggatccacatgatggaaagagagaactgaccccctatgagttgttctctcatctgtacatatgcactgtggcaggtgcacacatgtatgcatgtacacacacacacacaaacacacacacactcatacacatacacacacacactcatacacatacacacgcactcatacacacactcacacacacactcatacacacacacacacacaatgtttttaaatataaaggaacaacaacaataataataattgcaagacaatggctatagagccgtcgctgaaagcagggtctgtctgagcatacatacctacagagtcccatagctggctttggtgatgagacaagatacccaggttcttatactgggcttggctgtgctgaattaaggattctccagccttgtctcctagtctccagattactccagtaaaattctgtgtatagtgagagcctttggccttcctttcactccaaatttatcactcagcaccaaagagaagactccttgaggttaaggcacatagtcctgctgcatgaactttcctcagagagatgtgagcaaatggctactcacgaaagataggtcatcaatgactgatcaaagtaacgactccaggggtgaagttattatgcttacttgtaggcatgtgggtgacacccccaaacactcacatcactgaaaagtctcatcagcacaaaataagacaccgccttctataacctctgcagtacttcctgatcccactagaccacatgcaactcaagcagaattacacgcgtgggtggggaggctcaggaatgcttagccgcaatctcaagcaggtggggtctaatgacctccggcacctcttccatgaaggaatgtctctgtaggcctaatgtatggctgtgtgcacacatgtgtacatgcacgtgggcaccagggctcaatatctccaccttttttaaatttcattattattaatgtgtgtgcatgtgtggtttgcatgtcagtgcaggcacgagcacactatgacatgtggagggcagaggacagctctcaggagttgattctctccttccactgtggtatctgggacttgaactcaagttgttaggcttgtgtggcaaacgcctgtactcaccgagctatctgtctccctagaccctttccactttgttttttaagatcgggtctttcactgaacatggagctcactagttgcccagactggccagtatgctctggccatcttcccgtctccacctctgagggctgtggttccagatgcatgctgccacacctggcattttatatgactgccaatgacctaaactcagggtctcatgtttctgcagaaagtgcttcacccactgagccagctccccagtttcaacagagccaatcccaaggtctcctgtgagcagtcatagctgctttgatgagtgagtaagcttggggaacagtgctccaccacagagcctatgaaatcatcctctgcccaccccaagagggcaagtccaagggcacacaggaccctgtcatagtgcacgacgacgatggcccagaacaaccttagacaggacagggactccagggccctgtggcagcagagggtgtgcagagaaggaacgggtgggaaggattttgtacatgtgttagcctgggctgtccctgggggtggggacgggggtggttctgttctcttggtgtctctgtgttttatccaatggcagggattgcttttgtaatagcaggcaaaacccataaacaagtctctattcaagaaaaagcactgttctcataggaaccaggaagacagggcccccaagcaaagcacattcaaagaggagaaaaaaaaaagccatgaagattgttagattagaataactcatctataccaacccttcatagttcccaccctccataaaagcctggtgtgagaggctaggattgagttttactgggatgtcaggcgtgtgtgtgtgtgtgtgtgtgtgtgtgtgtgtgtaagtgtgatggtgtctgtgagtgactaagagtgggagggaggtgggggacagtttgtctttccaggatctggacccaaagcatcatctgtgatgctgagtggcaggatgacccagaaagagcataggctttggaacaggacagaatggcgtaagatcccagccccaacaaacctgccacgacacttcaccaagcagatgctccctggtgtgtagaagagggagctcagcatctaaattacatgattatagttctgataacaaaagaaaaccaactggtcccctaatgcgtagtggataatcaaccagtatattcctctaccccactctctgacactaccagtacagtgaactttgacatcttcagaggctagaccccaccgtgacctgtggcctgacccttgtgaataggagggaggactgatagcactctgggggccagggtctggagttcctggtccccaccaggcaccatctagccctgtgctccaagacggctggctgggagtcaagcccttccctggaaggaaccatttggtggagcgtggagacccctagtggtcttatcagagactgcacttcttagcctgaaactcccaccctggttcttcccttcaaggctctgcaaaaatgtcttgagcatatcctggatatattggtagtgctggagatacagatgggaaatgattttcattcttaagactccattgtcagatgcagcaggccaggccatcctatttcatttcttgccactacaaatactcatattgaaaaggggcttgggcaagatacactcacaggcctgtggcgtggcattctacagggcacctatggaacgtgcaggaacctgaaattcatatgattttcaaagacctaacttggtcaataaattgagtctgaagttacgttcccttccctcttggcaggcatgatgaaaatccctagactcatggttacacaggctagtgcttgtggtatgccagatactgggagaaacccttcgtgtatagcttctcagcccatagagcagagactgtgaacttggcaagcagcttgtgttccaggtgtagctgtttggaatacctatagcgtggagagttgaacccaggtcctctgggctccagagcccaaacttttgctcataaatcagtatgtctacctaacagggactcacaaagcaagttactcataactcagagccctccttggccaagtaaggacctggtctgttttgttcctagtttggtcactgtttcagaggcttgttcccaggccagactggactttgggcttattgcctaggttctctgttgtgggctttcaaaagccttcccaaaattattctaatgagggttggagcccagatgaacacaggtgctaaaggataagcagacagcactgtattctctgtgagaagtctgtgggtctggaaaggttggtgcatgtctgcaagcctagtactcaggaggcagaggcaggaggatccataattcaaggccagccttggttaacaaaaacctgtctcaaaactacccttctaaagcctgtgtggcccccacccaggtcttcccaactaccccatagatgaaatccacacctttaacacgtacaactggatgcagctaagcaaaactccaaggttttgcaagcgctactagcagatagacaaatgttctcttctcccttttcctccaagaaaccctgtaccccttaggaggcactgctcacttcccaccccaccccccagccctgcaactcaaatctgcttcctgtgcctatggatttgtagaatcataaaagatgtggccttataaaaattgtatttatggggctgaagagatggctcagtggttaggaacactttgcaaaggacccaagttcagttcccagcactaatgtcaggcagccagctactgcccacaattccagcttcagtggatcagacaccctcttctggcttctttaggcaccagcacacacacgtggcatatactcacacagaccatatacatacattaaaataagctttcaaaaatcatgtgtgtgtgtatgagagggagggagggagggagggagcatgcatgagaagctcagagaacaactttgtggagtcagttctctccttctgtatttatgttggttctaggtattgaacttaggtccccagatgcatagcaagcacttgggaggcacttgcttagtgaattgctctccctgcctggttatttcactccttagatagtaagcctcttaacccacacagatctgccctggtggcttaagcttggagcggctagtgagagggccatattactttaatcagataatcagattattcccctccttggcatctggcagagatcagagcattaggcaaaaggaaatgaaagcataaagcacccatcccactgggcagatatttatcaagtgcctgctacacacaggccaaagggccaagctctgcaatgcagcatgcccctggggcttccttggcagagtgagacctcagacacctgttctctctatcctgtcctcgtagctcccatctatcaccatgaagggccatgatgagcatttcacacggaatatttcacctgatcctcatgacagcagatacaggaagtgccttattagagattgacagctctggcaagggaagagtttgttggctcacatatggaaggttagtggggtgatcaaggctccccaatcttttgcctttcctctgtatcccatggcttccatggtggttgtgaggtagccaacaaggcatccaggcagaatgcttccttataataaggtccagcaaatgagagaggcgctttccagagttacctttcaacgataagggggatactcacccaaaaccataaatgagtctctctcacatttcgttaccccagattggcttggacctacccatctgctgacccagtggtcctccactctgactgatggaacatcaaaatcaccctgtgagttttggagaaagtaaaaaaatattggcactgaggactgtgttaaggaccatctccctattaagttatgactctgggggtgaccccaggcatcaagggtttaagctaacatcccaagtatgtctagcacataaggaaagctttggggttagaatttgggcaccatttccaaaggaggccattaccctaggatgaggaccctggccaaaataaatgaagacatttaccagaaaccatcatacccatggcctcttgctagaccccactgcccagtgtgtaccagtaattaataatttttaaaatcctgtaattttcttgtgaatagcataattatattgcttggcaattttcatgtgtgctaagagcattaatttgctaaatgtaaacatctaaatctatgccgtaattattgtaaaccatgttagcatgccttgatttttaatatccggggagcttctcccattataaggtgtccaggagctggggaatgtggcctagtcaacaaaacacttgccttgcaaacatgaaggcctgaatttcacccctaaaacacacattaaaaaagacaggcatggtggcacagactgtgctcttagcacttgtaaggcagagacaggtaggccactgcagctcactggccagcccagtctagcctacttggggagttctaggacactgagagacactgccaaaaaccaaggtggatagtactttaggagtgaggtctgaggttcacacacacacacacacacacacacacacacacacacacacacacacacacaccccacacacacacgaagggacccaagacttcttcggcttctacagattctgtgcctgatattcagccacaggctgagttgtacagccctaaacataccccaattctccacttccctaaagtgccattacacctaggcccctggccaggcctttgtagtaggttggatgttccctcaaccccttggctatgaccttattattcggtttgtactgagcaatgagctaagaggtggaaagaggctaagcaggtcccacatgactgttgctcatcagcctgagcctgggttggttcactgcatgggtgcactggactggactaagggatgtccagatcattgatggacaccattagtgggtgtgtagaagagactggcatcggactctccagggatgggttccttctggctcacagtttgagggcacagactatcatggtggagaagttgttggggaggagtgtgaagggactggtcacattgcatccagagtcagcagacagggaaacggatgctggtgctcagctcactttctcctttctattcagcgcaggcccccagcccatgcatagtgatgcctgcactcagggtgtatcttcccacctcagtgaacctcatctggaaactccttctggaagctcagaagcttgtctccatggtgactctaagtccactgataatcaagattgaccaccatgccacccttccagtgtgggtggacagcagccagtactccaagggcctgggctgaaagaaaggggaggggggtgagctctctcttcagccagactgacattttctcctgctcttggatatgcacactctgctcctctgcacacctccagagtcatgggagccaatctccacaataagctctgcatgcacacgcgaacactagggccacaggaagagacaggatgctgtgctgtgtctgatgttgagcctgagacactctgaggggattagccaggtcacttctgggtgtgtctggaggggaatttccgagtgggctaactaaggggggggtgccctgcctcggatgtgagtgttgcctcctaatagtttgggaagaaagaagaggaaagctcctgcctcaggtggtctcttccagtcttctagaggtgaacagcagcttcttcctcacacccctatggccatattgttttctctctgtgacccaaagcagtaaatccggccagcaatgaacaaaacctctgagaccatgagccaaagaaacttccttcctgaaacatacctctcagacatttttcacagaaatgaaaagttgattgacacatctgcttcctggagcagagccacaaagccaggccagactgtgccatagagggtgaaaataccagatccgtgttttgaaccacccggctttgggatgttggttgcacagcatcattgcagcattagcggcctaatacacattcatagagtagactggaggtagacattcagccttatgctttttggtctcataggaatttaaaggcctaacccaagggcaaagagtgactgaacagagagctttccctgttggtgcccagtgatcgaacttagcatttttgagggtgtggccaagtcctagtctaagggtagagattctgcacctctatatttcaaaattaaacaacctaactccatctcatcttttatggggccttggataggcccctaaacttccctgagcctcaatttcctcatctgtagaaggggacaataataacaatagctgtctgtgccgtgcagattaaaaatctctgaacagccatgtggtgttggcgaaacactttggaggcagaggcaggcggatttcaatgagttcaagaccagcctgatctacaaatcaagttctaggacagccaaaactgttacacaaagaagccctgtctcgaaaaacaaacaagcaaacaaacaaaccaaaaaacccaaaacaacaaaaaactctgtacaatggggctggaaagatggctcagtggttaagagcatagactgctcttctaggggtcctgagctcactcccagcacccacacggcaggtcacaactgtctgtaactctagttccaggggaaaggcaccctcacacagacatacatgcaggcaaaacaccaatgcacataatttaaaaaaaaaaaaaacctctgtataagatgcacagagcagggtgtggctcacaggaaccatcagagaagcaggcactctgcctacacaattctgttaataaactagcccgggtcttagcattcttttaaaagatttagttatttattttatatatatatgaatgctttgtctgcatgtacacctttatgccagaagagggcatcagatcccactatagagggttgtgagcctccatgtggttgctgggaattgaactcaggacctctggaagagcagccagtgctcttaactgttgagccatctctccagccttggggcttatcattcttaggaactgaagtaaagagagatccactgaccaatattctgtctccactactgtggtggattgaatgagaaaagttcttcatagtcttgggcatttggacacttgatccccagttggtggcactgtttggggagatgcagccttgttgggggggaccatagcatcaccagggatgcctcccttgtgagttcaaatcttgttgacacttccagtttactctctatgctttgtgtcttggttctgtctgtgaacttgctgctgtctgttcctcccagcacatctgtacttggtggctgtgtttgtgctctgtcatcatggactctgactcctctggagtcatgatccaaataaactcttctataagttgacttgtcaaggtattttatcacagcaacagaaaagtaacaatactcacttgtgtgtgtgtgtgtgtgtgtgtgtgtgtgtgtgtgtgtgtgtgtgtgtgtacacaacctgtatgtagaggtaagaggataacctcaggtgtggacgggccattgaaccccagagaccttcttgtctccaccatcctccctccccacccccagtgtcgggattacaagtaagcactctgtcacactgtcatgcctgacctttttattattattaatatttaaggtttatttattatgtatacagtatcctgcttgcatatatgcctgcgcgccagaagggggcaccagacctcattatagatggttatgagtcaccatgtggttgctggagattgaactcaggacctctgcagaagcagccagtgctcttaacctctgagctgtctctccagcagcatgtctggcctttccaaagtaggtcctgggatttgaactcaggtccttatgcttacacgttacctacttaatcgtttctccatgcgtggttcatatcaggcaaccgtgaagtagccgagtatagaaatagcatggtggggtgggaacagactaaattgtgagcagagcttttttggtggtgccctgtgtgtcatgtagctttgaactgggctgaggactgcttggtccatggggacctccctgaggttggctgggcagtggaggagcaagttccctgagttggtgtgtgtgtcctgggattgccttccagactctgagactcagtttactccaaagcgaaagggtggtaatgctaggaagtgagggcagagcatcctgtcacatgtcctctgctgcctgtgacaaggcgcctccttcctagggggaacctgagccctgctgagctgacagatcctgggggccctgacaagtgtccactaccccatgccagtacaaagctgatctctaaaaggcaaggataggtgcagaagtttctctgaattgcagtgtgcctggggcctaacctataggctaggcccagagggctccaaagccagctgcttgccggggcctctggtgatggaggaggttggcagacccctgaggctaggcttagggaaaacagagagaatgtcccaactctggtcactttgctctgggagtctgtctccttgaaatgagactcatattctcatgcatcttggacctatacaaatgttccctgcgggggctggtatagaaaaaaagacccttgctacactacaaagatccaagggcccagaggctgctctcagctcctgatcctcagcttctgtgctgtaaaacacagcttgaacagcctcacagccaggatatgcctctacccagtcctgtgtgtgacactgtctctctaactctgcctcacccaggaatgcacatgttaggagatcccaccaatcctattggtgtgtatatatgtgtttagtttgtggggttattttccccaggactggagatggaagcctggctattagactctatcactcagctaccttcacagatcttttgttttgttttgtttttttacataccaatcccagttcccctccctcctctccacctgctctttccaccttctccctaccccacccccatcaactcctcagagagggtaaggcctcctcccataggaagtcaatgaagtctgtcccatcaccacattgcggcaggaccaaggccctccctcctgtgtctaggctgagcaaggtatccctccataggaaatgggctccaaaaagccagttcatgcgctagggatagatcctggtcccactgccagcggccccacaaaccgcccaagccacccactgtcacctgcatccaagggacctagttcgatcctatgcaggttccccagctcgtccatttggagtcagtgagctcccactagctagggtcagctgtttctgtgggttttcccatcatggtcttgacccctttgctcatattatcgctcctccctctctttgactggaatcctggagctctgccaagtggttagttatagatctctgcatctgcctccatcagttgctggatgaaggttttatgatgacaattacggcagtcctcaatctgcttacaagggaaggccagttcaggcacaccctccactattgctcagagttttatctggggtcatccttgtggattcctgggaatttccctagtgccaggtttctcattaatcccatagtggctccctctagcaagatatttctttccttgttctccttgtctgacctcccagctcgaccctcctgatccctcatgttctcctcctcactcctgttctcctctcttcccttctaccctcaaccctccctcccacactcccaatttactcagatctccttcgtttccccttcctaggcagatccacgtgtttctctcttagggttctctctgtttcttagcttctctgaggttgtggactgtaggttggttgtcctttgctttatgtcaaatatccacttatgagtgagtacatattatatttgtctttctgggtccgagttacttctctcagcatgttttttcctaattccatcgcagaactctttttccattttatttagagacaggggcttgttaagttgcccaagctggtcttgaacctgggctcctcttgctcagcctatgtagccggaataacagcccttaaagggaccagaccctcacccaacctcctgctttgacaactatgacaggttgcaaaaaagacccagtaagacataggcccctgactcagcaacatgctctgagaccttgcccggcctctagtcactaggaagctagagaccctccacgtggcaaggaaccaatcagaagttagctggcagctctagatgtgctttacggtaacagtggagtgcagaacatagcaaccgccctggagggcctataggcatagcaaccttgctatagaaatcaagggagaagaatttaaagcagctgatcctgcatccacaggaagagggagatgagagcatgctattgctcagtccctttattcatgcaggctcccagcctgagaatggtcctgcccacagcaaaaggggtctttccatatcgattagcatgatcaccataatccctcacaaacaagcccagatgccagttttccaggaggttccagagacagcaggctcagtccatccagaactttattttttctaatttttacttatttatttttggtttttcgagacagggtttctctgtgtagctttggagcctattctggcactcgctctggagaccaggctggcctcgaactcacagagatccgcctgcctctgcctccagagtgctgggattaaaggtgtgcaccaccaacgcccggccatccagatctttataacacaggaactggtgaagctgacacttgagggcacctagctggatgcctagtggtgtcaagaggacccatactcccagcaatccatgcgaaggatatttggagaccacgagggaacttgagcatggactgtggagtggaaagatgtagatgagggctagagaagtggcttgccggttaaaggagcttgcttagcaagcccaaagaccagtgttacagttcccagcacccacatcaggtgtttcaaactgtctgcaactccagtttcagggtctctgtgtagcctccagggggtctgactgacctccatggcaccttagaatttgtggctcacatatacggagacaagaacacataaacgcataaaaaattccaatcaaataaatactttttttaaagaagaaagatatagttgggctggcaggaagaggctgaagctgctactgacagcagacagtaggatctcatgttgattaaaacattcacattcacaaaaaaaggccagacaatagatgtttacagtgagactcaccaggggcacagaatgacagctttgtttctttaattttttttgctcatctgcatgtttaacttcttaggataacaaaagtttgttaattgtattttgaaacaagatctcaaatacttagatgtaagcaatccttctgccttagcctgctggagagctgacactactggctttgttaccgtgccaggcccttattttattttttgttctgggagatggaacccatggccttttatattcaaggcaagtgctcttgttacagccccagcccttaaaaagtcgtcttatttatcagttggtgctatagcttgattgtcagagtgatcacctcatatacccaatgccctgggtttgatccccagttctgctactataaacttcctggtctcaggcaaggatttgcttctccaggcttcagttaaccccacatcccatgctgttggattttttgttttttgtttttgtttttgtttttttgttgttgttgttgtggtggtggtggtgtgaatcaaacacagagctttggacttgctaagtaagagttctacctctgagctacgtgcccagtctgtgttaatgtcctcactataaatgatgctgagtgcaggccctgactcccagggtttgttgaaggccctatgagttaatagtggatcccagtgcctggtgactacaaggtatgaatgtcatttttattgaccattcactatgtatataactgacttgtggatggtatgaagatggagaagaggatgatagcccagctttcaaacccctcacagaacatacacttgctctgttcagcatgttttgccgatcaaatcagggaaggtctcggcagccagactcctccagttagctctggtctgatgccatttcctaggacccattcaccagggcttctgacccccttctcagccaccaggagttggccgatacgctctgatttttgtggctgtcatcacatgcatggcttgaagaacaacagtgctgaatgagtgccaggcagttcctcaaaggactccggaagatctgcaaggacatctttttggtcacaatagctgtgtgcatctgtgtgtgcataagtgtgacctgtttatatataaacacgaagcaatctttcatgcttcttatatacatagaattttctggcaacgagactattgtgtatggaagagaagattgtcctttgttttgtttggcatctttccaggacttggtgcttaattcatgtcactggccacagagcggctcatggtgtctgagtcagcctcacagccacctgtgtccactgtctttgtggctgctgtggccctcacggtcacatctctagtagcaaacgtggggccatggaatccttgctatagtcagtttgcaccctgcatcctgaaattcgtattattttattatggattgcttttcatttttccttcatagtacagcacattgatttttttcacttgtttgaaagcatatgtgcacacaggttagattatttatgaatttcatttctactcagtaaagaggacattagaaaatatttgtcatccacatgggagtcaggcatgaccggcctgcaaaccgccactcaaggacccacatttgtataattcaggagacccatttctgaactggccttagcctcagccatcagttgggagaaatttgctgagatgaagtgtacagccgctcgcttgcctgtgaggtgtagagtttgcccccattgtcgttctactaaacggaactttccctctcctctgaggaatgttctgggtttacaaccccatgacttgtctccttgtgccctcctgtcagtcagtgtcttttccagactttcccaagtccggaaaaaagcaagtgcttggcttggccagcctgtccccttctatgctgccacccagcccccttgccttggtcccaaggcctcttctctctgcaatgtccagtccatcccttcctctggctcccaccatcctcacccccacatggctgtacctataacttccagttctgttctggtttctgtaagacacttctagaaagttgtttccacccaggtctggaactggccagagaaaattggctgctgtggaggagagccagatgcacttgagaagttccaagggagatcctctttccacccaagacagaaccaactgtctgcagagggtaaggtatttccctacctctgtgacttcttacccagaccaagtggattttggatgttcccagccttgaacctgactttcatctatgaaactgcccagtctctggctcagtgggaatacccagcgtaggctgctatcaaacagagctgtagagactttgcccaaggacaaggtggggcatgcccagaagctcctcccacagatagctatcggctaagtctcttctctgcagagggggattgggcatccctgggacccagtggatcctaggagggagggcagagaggctggcctggcattgctgcccaggtcagtactgatgttctctcctactgtgtcagccccagaattgaacttgggtcatcagccttggtggcaagcgcccttaccccctgagctgtctcaccagcccagcagctgaattttgatatattcattggctcaaaaaacaacacaaaagatgactgcaaattctggaatgcttttcagggaatggatggtattaatcactagggcatatgcatacacttgagagcctttgtgctgtagaagccaaatgctttccagtgaggctgcctgtgaggcacaggtgggaagtaggaaaaacacaagaggggaaatcgatgcgtcagctccacagtccccccaggtttcaggtcatctcactgaggagaatctgggtccccactgcagtcctgatctatgccactaactccttgatggtgcaggatctggagaaaggctttagctgaatcacgttgcactttggatatagtttgaatgtgtctcctgtggtttcggggcctgaaaaatttcctcactgtagtaagaggatgcaagcaatctaacatgtgtccaaagatgtggcccctgggagattagagttagattaagtcattaggtgatgacccatgattgaatcctactggcttctctctctccctctctccccctctctctcatctccccatgtgaggttctgtgttgcttaaggatgctgccagcaagaagaccattgccatttgcaaaggcttgaccttggatagactttcagaactgtcagtcaaagtaggtttgcctgcctgcatgcctgtctggtttccttctttcttttttaaaactctgtgtctgagtgtttttcctgcgtgtagtatgagcttcacataacatatagtgctcaagaaggacagaagtttgtattcagttccctggaactggaattacagagtgttgtgagctgccaatgtgagggttaggaactgaaccagatcctctgtaagagcaggaagtgctcttaactgccatgtcatctctctaacccttaagtcacctttctttataactcctccagtctgtagtcctgtgtgacttacaatagaaacgggctaatatgggaagacttggtgccactcattagcaagccactctatagtctttacgggcagggcttagagcaccctcaggaagggtgaacccatagcgaagtgccttcaggttggaagccaggccaggccaatcagctgtggccagtttcagtggatgggaaaaaaatgagcaggctgaggccagatccctcaaaaggtgcctggcaatttgtctaagactgaaaagatttctggcaagtatatgaagtgaccagaatcgtcttacgtaattggtgggagtgcaatgaggaaatcattttgaaaagcagggaacatggatcacaatacaccccaaacgtctatccctaggaatatacttaacaaaagacaaatgtatattgaaataaagaggaggaagaagaggaggagggaagggaggaagcagaagggagcggtggggagggggaatgagggggaggaagatgaagagagggtatagggaggaagaggggagaggaggaaaggagggaggtggaagaagaggaaaaggaagaagtggggggagggaaggagggaaagcaggaagaaggaagagaggagggggaggaaagagaacgaaagagaccatcttgagatagaagccagcttctcatagtcggtaagggcagggctgagatgagccatgggctagaacatgttgaacaggtgccttttcccccagtggacaaataactcttgggttgggagttgtagcttcctgactggctcagtctgaaaatttgctaaaaaacaaaaaaagaaaaatgaaaaaagaaagaaagactaatctcaataaagatgatctcagtctcacccactttccaccataagatgtagaaaatcctgccagtcagtgcaacatgatggttcctccctcggagcccctcccactcgctaaagatgtttctcactttccttcataaaaccacgttcactctgttcacttcttatctgtttacttaatcttctctggcacgagacagctggcgtggccttggttgccactggttgtttagcaccctagctccctgagttaagtagcccttagggatcagacacttgagcattggtgaggtcccttatctttggtggtcttggagctcaccctccatagacactgaggggctgctctcaagagggacaggtgtcagaggtctgacactggccccaaggtctcctggagccatggattgttctgagagaccccaccagatacctgcctcctgtgttgaagggttctaaggtgtgcttgcttcccttaactgatcccaaaaggcagggaagcttttgaaaggctccaaggccattgggtcctactccaaagtcatcattttttgtgttaactgaaaagccacctctggctgtcatgtcagaggggatggatgacagttcaggagactcactccttgtgttcagttgagagagctcccaaacccagggcaaggcctatgatggagtacttgccatgcaccaaggaccatgcctagacaccacactgacactcagggctgatactggtaaacccactttccagaaagagaactagggttctaagagggtccccaaaggtgaagcaggaaaagaccttggaactggattctcttggctctgaattgctgttggagacctgcctgcctggggtaatccttttcttagatataagaggagtcacaaaagaggggcaaagtctgtgattataggtatgaccatttactcccattccatacatggcaagggctcgttacccagaagtcagcttggtagaggagattgatagcagatggagtaacttcctgcatctcctccctctttgtgagccaaccctttcccagaaagaaagctctgcaaacagaaacaggaaagggctcctggtggagggagctcaccttgaatgggttggagcagggcactgtgggaaggggcacacttagtgtactgaaaggaccctgtggtaggagtcagggttcagttttgatcctgggcacgcccctaccatgctatgcggcctaaggtgactttccctccctgagcctctgttcccttacctgtacaacccaggaattgatgctgctgattatcttataagggcttatccacagatcacacaagaattaactgatcccctactttggtcaccaaccaagcactggggacagagcacaagttaggcctggcctttgctcttggagtggagccaggaccaagaagactgctctaggggagaagttgcccccagcccacagaccctgtgagattggctcaaagaacaaaatgaagcttgctcacacctgagcattaccctggagccctcaagcatgttcctgtcccccagtgctccaggccctgctgtagaccagcatatcaggaagcttcagctttgggggtgctctcacccccacttcctgatgaacctaaggaaagacataaagtgttcttcttgaaatctggccggaagggcagaagacactgtggatgaatttgtgaacaggcgacctagtcagaggctgaaatctgtgcagaggccaagggagaaggaggccaaacaggtcagaggtggcttgctttgtccagggacaaacaggctggattctggacagtgtggggccctggaaaggtaacagggcagatgtcaaccccaggctacatgtcaagccctacaccaacccccagatgaaataaagataccaacttcatctggaccacataatattttagcataaatatatcttggcaatctttgggctgtactgatatcttaaataattgtttactgttgagctgagattaaaattgagtatttctttctttcttttttttttttccttgagacagggtttctctgtggctttggaggctgtcctggaactagctcttgtagaccaggctggcctcaaactcacagagatcctctgcctctgcctccccagtgctgggattaaaggcatgcaccaccaatgcttgttgagtatttcttttttaagagacagactcttaggtagggtttgggaagagagagatggaagaggggacttggggtggagcttccgccagaacatcccagactcgttaggtatatggatgccagggggtgaagcttccaccattccaccagaactaccatttctacctgagttgaactacatggatggatacgattctgtgtgtgcgcgcgcagagggggaggtgggggggagcgcacacacatgcacatatgtatgtatgggcatacacaccctatagtggataccaaagaagaactttcaagaatcagttcttgggctggaagagatggctcagtggctaagagcactggctactcttccaaaggacctgggttcagttcccaggacccacatgacagctcacaactgtctgcaactccagttgtagggactctgacaccttcatacatgcaggcaaaacaccaacgcacaaaaagaaagaagaatcggttctttccttccatcatgtagattgcagcaattaaactcaggcttggtgagaagtgcctttacccactgagccaacccaccagcctatgtggatggttttcaaaaggttccttaaccctgggtgatgtaaggaaaaggaaatctgaggccagaccctgggctatgatggctctcaggatgtgcttgctagtcagatttgtactgcgactcacacattttatgaaaagaaattgccttgccaaattactttcactttgtttgtgtatttctttgtacaacactgagaatacttgcttctaataatgtaattggactttgtttctcataattccaaattcaggaaagcctaagatctagggccagcaaattcagagtaaaggctggcctctgatttcaaaatggtgcctattaatcatctttcccatttttgtgaccaaatacctcacaaaagcaattcagtgaagaaagggtttctcttggctcatggcttcaggggatatagtccatcctggtcgtaagacatggcattggggacatgagacacatgttcacattgtgtccactgtcaggaagcagggagagatgaaacctgattttagctcactgagtggtttgaatgagaatggctcccataggctcatatatttgaagggttggttcccagttggtggaactgtttgggaagggttaggaagtatggccttgttggaggaggtatgtcattgggggtgggttttgagctttcaaaagccaacactatttccagttagcgcttggcctcgtggttgttatctccatatgtaacctctcagcaacatgcgccataaagctccagcgccatgcctgcctgcctgttgccatgcttcctgccattgtagtcatggaatctactacactctggaattgtgagccccaaattcaatactttcttttacaagttgccttggtcgtggtgctttgttacagcagtagaaatgtaactaagacagaagttggtaccaggtgttaggaataatgctctcggggaacatgccaggcagacagagcttagtgagatgttttattagaaagggaaagggtgggggaaggaaaaaaagagacaaagacacagagagaggacagaagacaagagggagacaggaaaagtcctgtctgccccagaggaacagcaggaaagagagcgggaaagagagtgtaagtggctggggtggggggtgtctgtcttttaaaggggtcctttacacctgagtgcagactagtagtcatggaactctgggctgactggggtactgcctgagtgcactctgccaggtgacaggggcaggccatcataatgcctgaatccttacactagggactggggtgtattgctgtgacctacctatgagttttttggagaaatgtagagactttgggactttggattagaaaagtagttgaatactgtatgtgggacctaatgggccatcccagtaggagcttagaagacagtgctgtgaacagtgtggactatgggtgtctagttcaagagtttacagaggggaacaagcttgctaactggctgagagatcattcttgtgatatttttggaaagaacatggctgttttttgactttgtcctaagagtctgcctgaggctaaattgaaggtgtttgaactaatttcactggcagaggtgattctaagacagccgagtactgactgtgtcatgtggtaattagggatcactctcaatgcagatctacaacaaaaaagagaatgcaaggcaaagagaaatacaaaatgtacagtttgaggagaaaaggacatttaatgttggaaccttcgtttgtgcttgaagatacacacacagacaaacacacacacatacacacacacacacacagaataaagggagtggtgccttccggtcaagactccactcagctaatcctgaaacttgtgaaaggaaaaggcctgagggatttcggaaaaagtaactgcaaaggaaatcttctgcaaacgtatatggaggagggagccaggttgcagcccaagtacactgcagaacttggcagtttgggccatgtggttctggcctaagaatcatgagggatacaagaggaaaggaactgggatcttcctctgcagttcaggaaggccatcaaggctaagcgtgtggcagaggagtccctgcacggaggccttgagagaccagtgtgagaagctgtgaaggtgaagctcagattgattggagaccccaggatgttgaagacaccagagccatggaatacctgccaaggagagctgcacagagggagtggaaccagcacaagagagaaaagtgtgctgcagtgaccagaactggaagccagagccatctgagccctttgatatcagtcatagagctacaggcttaggagcccgctctgctgggttttggtcttgctttgatccagtacttcctcactatgcccctattcctcccctttggaatagtaatatgtattctgtgccattgtatgttggaagtatgtaattcctaataaagagattgccttgagtgctgggctgtggtggcgcatgcctttaatcccagcacttgggaggcagaggcaggcggatctctgtgagttagaggccagcctggtctacaaagctgctatacccggtctcaaaaaaaaaaaaaaaaaaaaaaaaaaaaaaaaaaaaaaaaacagagagagattgccttgagtctcagaagagactttggacttttactctgtgttgagtctgtgaaaacctatggggatttttgaagttgaattaagtgtgttttcattatcatatgacttcaagcctatgagaactagggagtggcatgtgatggtttgaatgagaatggcccacagaagccttcaatgccttttatgctcagttatgagttgatcggcattaataccaccatagcagccagcggcaggcagctaggaccatagacttccatgtggtttctggcagcagcacagaccatggacatcaacatggtctctggtgggagcatgaaccagggaagtctcttggaggagacccagtccaaagacaaatcattcatatcagacatcattttttcccttttttgaaaatttaaattagaaacaagcttgttttacatttcaatcctagttccctctccctcccctcctcccctgtccctcattccctctgctccgcaaggagggtgaggccttccatgggggatcttcaaagtccgtcatagcatttggagtagggcctaggccttccctccatctcagacatcttgttgttgctcagagttggggtaatcgtgcggctggacagcagtgtctggggcaggacccttgagagcttcaggctgctgtacactaccccgccttcagtgcttgacatccgactggtaccccagacatgaccattgtgtttgcaccccagagacagtgctattgtgctcttatgtcctcagcagggagagtagccccatggtgctggtgggctgagtggtggcactggcccagcaggctgctacagggtgaggtaggccggtggtggcccaagcctcccagaggccttacttggcaacagcattcttctttgtctgcaacaatcacactctcaaacctgtcaccaccatgtctctcaggcctcacatcttaataacatcatcttggaggttaaagtccaacataggaattttggtggaatgcaaacatttaaagcatagcaatctatttatttataaaagttatgaagtgtaaaaaaatccttattatgtatcagcagcagactacactagcaagttatatatatatatatatgcatctaatgaaaactggattccaatgaagaacaaactatttcttcagggacctagagagatggtgcagtcatgccgtacaagcatgagggtccaaatttagatctctagcatccacataaaaagtcaaggattggggaatgtgcctataattgcagtgctgaggaggatgagactagcagatcactggagctcattggtcagtcagtggcgtcaaatgggtgggttctgggttcagtgaaagacactatctcaaaagtaaggtggaccaatgaatgttggtgtacatctttaatcccaggacccaggaagcagaagcaggcagagctctgtgagtttgaggctggcattgtccatgtaatgaggttcaggccaaccaagactgcacagtgggaccctgtctaaatagaaagaaatgtaagggagagattgagaaagatacctgactttgctgtttggccttcacacactgaactcctacacatatacaaatgcaaaactatttatctatgtgaaaaccaaattcatggatgtgttgcatggaaataaaatttgagcaaaattaaccaaatgtggaagcacactgtattagtcagggttctctagaggaacagaactcatagaatgtatacgggggcaacattagaatgccttatagactgtgatccagctagtatagcaatggctgtctaacaaccagggctacacagagaaagcttatctcataaagctaaaaagactcttttcttccgtcatgccactgaagatcctatcatcatcataggccactcttccacctggtattaccaatattgtaagaacaagccatacttaaagtcttgtttctgctgcagcatccctgatgccaagatctgcatatttgctttgggacggaagaaggaaaaagttggtgaattccactttgtggccacatggtgtcagatgaatatgagcaactctcttccaaagccctggaggctgctggcatttgtgccaacaaatacttggtaaagagctgtggcaaggatgtctttcatatttcagtgaggctccaccattttcatgtcatccaaatcaacaagatgttgtcctgtgctggagctgacaggctccagacaggtatgtgtgccatctttgggaagccctaggtcacaatggccagggttcacattggccaggtcatcgtgtccatctgcaccaggctgcagaattaggaacatgattgaggctcaagttccctggccgccagatgatccacatctgaaagacatgggcttccccaagtttaatgcagataagacatggttgctgagaatcagctcatccctgatggttgtggggtcaaatatgtcccaaatgcagtcccctggaaaagtgacgggccctgcattcctgagggtttcctcatgttctcctgtaccctactaaaccatgttcagtaataaatctcacacccagtctgaaagaaaagaaagaccaaaaagaaaagaatcactcataggtgtgcccagtcatttgggttttagttaattctaatttagttaattagatgtagtcaagttgacagccaagaatagccaccacaatacctactacattcttgcattggtagaaagtttactgacagacaaaacctgtctacagaactgaagtccaaataatgggtacttctaggaaggcagattcagactgtgaaggacacaaggaactgaaactgagccttcacttgtttggggtagtaggtgagtacatacacaggaatttgtcaaggcacaggttttactgtgttgagttatagccaagaaaaaatggagtctatattttaagatcagtgggaaaccacagctgggatttaagcagtgacttgacataattcaatgttcatttataaaaggtcactcagctgggtgaaaaatggatgagaggtgagagccactgctcttaagtcagcccaaggcaccctgttgggcagaaatggattcttcaaggatattgaagggatctggagaggtggcttggtaggtaagggctcttgctgccaaacctaatgagttgaattcaatttttggagctcacatgggggaaggttaaaaccaatgagcacaaagcgtcatctgatttccacatatgcactgcaggatgtatgcacgaccatgtatgtacacacacacacacacacacacacacacacacacacacacacacgtactatgtacgtgggcatgcacataaaaaaggaaaaaaacatttggaagggaaaataaagaagagatgatatttaacagctaaatagacgggtagatgatagatgtgagagttaatggatggaaggactaatagatagaaagaaggatggagaaatggatgagtggatggataatggataggtttgtagaaggaagaaatgatagatggatgggggggttgtggatgcaaagaagatggatgtgtttgtgaatgggtgaattggtgggtaggtgtgtgtgtgtgtgtgtgtgtgtgtggtgatgtgacatattgagtggatggcagaatggatagctgggtgagtgggattatgagtggaggaacaggtagatggaaggactcccttaagtagccaggctctctactctggcttttggtgtccagagagtacagattaatcatactatcagtgagcacactgactttccccctgagacatctctgtttacactcccgtcattccccagtgccccaaaagagaaaacctagttactacaatgcccaccaaggagcagacacttacaaataggatgtcttaatgagatgaaaggatctcccaatcctctggacatttgcagggaaggttctagtgatgcccacgtgaacaaggaagaggctagagtggagaaacttcctagaccttccccctgggaagcattgaggttgcctggtctcctctatcattcccagcagcaaatcactatcaggatggcctcttccattgccacccttgctaagacaatcccatacaaccgttgagctgttattagtaaactaaatgagtttaggtcaaagatgtaggcttgtgactccttcctggtgggagagaactcaccccttatataggacctcagcacatttcgatgatggctgaccttccagccctttagatgccagctaagtcatgtggccagggccccaccacttccagtcagttagcccctgtgacctattcctgttatttcatagcagcaggccaagggaagacagagagggcaaaagtttggcagtgcagggccagcaactgtttgcagaggcaggaaggtctgaaatcctaactggagatgtctaagatgatccagagatggcactggctccagttgccccaaaatccatttcatatgcatttcctagactctgctactggctaatctctgtccctgtgggagtctgacagctcagcctccagagctttgctctccccagcctccccaggctggctgagtttgtgctatttggataaacaacattcccctcttgggatgccagtaacagacttatttacctggtggccaccaagcaattccttcccacctacccccatctgagattccaagataaagggcaagagctgacaccttgtgatactcagggataaaagacttagcccctgagggtggtcaaagttctcacaccagctacagggatccagggctgggtaccacaaagccaccatgcccccgacctgtgattttatccagtaattcaatacttacatccaagctaagatgtacttgtgatattttcctctgcctccaaccatgaacagacactttatacttttaaacccagtgtgttttgaattctcccaactctttgcagaagtcaggagtgtcttagaggtactttctctcttaggctgtgtgtgtgtgtagtgagtgagatcactcagtctaagcctccaaggagcaatatagaaaaaaaaacaaaaacaaaaaccccacaggggtggtgtccagctcaggaattttgtagtcactggctgaaccatccctgtctgcagctgctgtgagagtctggggcagggtacagttgtgccagctgttggagacaaattatactatgaaattcagccgtgagtcacattccagcacaggggaaatgtgcaaaagttatactccgtctttgggggtgccaaaaaaaaatcatcttggttttgtcttgcaagatgttcagcttgcagaatgtggggcagacggagggagggggtggggaggacacaaaggggagcagatctgtctccagccgactttgcctgtcacacaccctccatcgcttctaataacaacacccagcacttaatcagcccctttgtggaaacaggcgatgtcacactcattaattagttaatccgcacagccccctggggggaggagccatgttattatctccactgggacccagagggaaactgaggccagaatgaagatttggcacagggctcagggagctctcagctaggtagctggaccaggaccagtctacatcttgtcattggttctggtgccctcatttcatcctcctcgagtcgtccattcacaaccctgtctgtctccagtgacacctggctgaaccaggctggaaggtactctgaggaaaagtcaacatggcattgaagcaacaccaggacaaaccacggagagtatgtgttcagagcagccacccttcatggctgttctttatcaagggtctcagaagtaggcattgaggagctggggagatggcttgtttggcacagtgcttgctcaggatgcatgtgggcctgagtttagatccctagcagtagtgaaaaaagctgaagaaaagccaggcgtggtggagcatgcctttgatctaacacttgggaagtaggggcaggaggatctctgtgagttcaatgacaacttggtctacacagtgagttttctaggacagccagggctaaatagagaggccctgtctgggggtcgagggtagggagttggggggtggaggggtggacatggcctgtaatcccagtgtcagggagacagagacaagaggatcctcggtactcactgccagccagtctagccaatcagtaagtttgagagttcctggactagtgagagacactgtctcaaagaataagatagacaaagtggacagcaatagagaaggacactcagcatcaacctatggcacacacacacacacacacacacacacacacacacacacacacacacacaaggggtggtggggactccagagaccctatgcaggacaggaggggtaaggagtcagaggaaggaagtcatacattccttccaggagttcaaaaccagttgcaaaagtcatgcttgcagcctctacctgtgtttccttgtttctgactcacattgttgaatcctaagtaattagccaataccttttgtctgtttgggggttggtgattttgcccagaatcccatgtatgctaagcacagaacattcctaggctctgtctttttaaaggggatgatcacaaggaaacacatttttctcacctttccctttcctctttcccccagttgcacaataacagtttctcaaactttcacatgcacgcagatcccctgaggggttcgtaatcaggctaagatcttgggtctgagggtcagaatttctagtaagcttcttatggagtgtccatgtcacctactcagacgaaagagttcaaaggcgaagttggtagcagtgaatggaccctttaaccctgctatgggatgcactacacgggaatcactgaagcagcaattcagtgaacaggacatcatctcgaggatccccgggtaatattagcctcccacattgtgaacggtcagaaccggtttggcgagagttgcatgaatgggaagaatgatgtatatacgactctgtgtgtaatcgtgtggattcgtgtgtgctggacagctaagcggtggactgtagcaaaccattttggggtggccacacagacatattttctccattgggaacttctctgagtaagggggagggctggtattgcagaggactttctgcctggccataggggatccaccatggtccacaggaccggtataattctttcttccaggggtctggaactttgaggcaagagatattatctctggctgtgtgatttgaacgaatcaagacaaattagagataaggtccttgacctgcaaccaaggcctcccccagtcccttatctcctgacacatcaggaattactcttcttgaattccttgagtttcttcccacttcccattttctttgcctaaaccagagcttgcctttgaaataaccgtagataacactgaattacctggggaggggctgaaccgcatcaacaaagggaggtctgtcctggaggcagggtttcactttcagccagatgtccacctgtggccacaaccacagcgcctacccaagaagagtcaacggcccggatttctcgggatgacgactaggcccgggaaacattttagagacttttctgtgttaactcccttttagacctctcgtgacttttctggacctttgagacctggttcgctgcgtcatcatgacctctagatccactcatacccatgaccctctgtgcagctgtagctctcagcttagcccccacgtggaacatcgattctgtcatctgcctccccgcagcgacccgagatcctcgagggcaggccggcacccacccactcctcagactcagcccagcacaccagtatagctgcccctgctaaaaagcagctttcaggaaggcgtgttgagcgacttgcagcgtgaataaatgggcgtgtgtgaaggagaacaggaggggcgattttcttcatttaccagaaaatcgaaattgatcaaactcccctttagctgtcaggcacaatgttggactttgaggagtgtgggagtggggttccaagataaagtcatcccaactcttcaacacgctgctaggtcccttgaaggaggtggaacccttctctctcctttcctccccccaaacgaaccagttctccggtgatcctacttgctatttttcctctcccacgctaaaccctgtcacgcggggcctgaaggagggggagcccaagcagcccccgagcccctgtgcagtgcccgcgttccaacccctctcgtctgcccacggagcccgggtggaggcctcagccccgcgtccaccgcccccacgcgcggggagcccggctcctgcaaaggctccgccagcttcagcttcagagccgctcccctccctggcactagggggcgctgccaccccacgaccgtcgccatggtcaccgctggcggcggagtggggtttacgtaaaggacgcagcgtcccccggggggcggaggcggccttcgcgccggcgccggcgccctgcggaagcagcgttagtgaataggggccttggggagcccaggatggaggtggcggtcgcagcggccgcggcgggccgagccctgcggcgggcgggaggtaagggggcccgggccaagccccgggcgtgggcgcggtgctggcggcgcggcggactgggcaatgtccactgcgcgtggtgaccggtccgacgggtccgcgggcggaggtgcggctgccacgcgcgcttgtggcaggtgtgagatccgcggagccccgggccaccggcgtggggatgatgacacgcgtggcacgggcgtgggcaacgtggatccagcacgggcagcgtgatttttcccggcgagagtgtcagaagattcacccccgccttggtgtggtggtggccgcccaggtgtgaggagggtgcaccctctgcacggagggtgatgcacgcagctggtgcggggtgggtggccagctggtgctgggccatgatggtgcggagggcatgggtgtgaggaagtgctgccattgcttggatgttgggatggttctggccttggcttgacatggtttggagggatgatcctgggggcttgaagaatcagtgtcctgggcatgactagtggctctggcccagctgtgagaaatggccttggcttagcgcagtgccctggaatgactagcattgtgaggggagacttggtggcccttagaccctggtacataggagggtcaatacccacctttacaaagatatcagaaggggcaatgcctctgttatggggctcagctttaatgtctgttcggtgtgctgacctgggggcaggaggctggaaggttggtgttctttataatgaactagaatgagagacaccatgagattcgtctaccatgagattcttgattgctgccctaggtagagctctgcctggttatgaacctgtacccagctcatgagtccttctcactttggggaagatgggaggaataggcccttctcactggtggtccttgtttctgactgtatgagaatcagcaaggtgcagagaaggttctcatgtctgtaggtcagggggcccgtggctcaccatctatctgtcatccctgggccctttctttttattgagttgatggggctgctactgggtttctggggtccagaggaccttttgaggctgtgtggatggtgattctgtggctactaggagtgttccaggattgcatctgtcctcattagtcttctgagaagctttggggagaactcccctccctccctcctcctccctccctccctcccctccctccctccctccctccttgtgccacaagctacttcacagagtttgcagccccctagagaagtcttgggatgttagagaagacttcaggatgttatgggtttcttgggggaaggcatgggggtagaagcaaagagctgagcttttcatggggagggtgtctctttgccaacatgggtgcttggagaagcctccctcatctgcaggaatttaagctaagttccctaaagctgaagtgtcattcattgtgtttagagccagatgacttgaattccagtcttggctgtgtgaccttgagcaggtgttgttacctctaagagccacttcacactgtggccccagtggtcacagagaatgaaaggagatgttgtgtgcacatggaggcttctctaagcagtgaagggctatacaaaggtcaggtaaagagaccagggcaagagacaagggtggtcagaaacggaggcatggaatgtgattggagaggaagagagcccacggccgagggcttgtcatagggaattagaggcccagagtatacaagttcctggcggggggatgtggggtctgttgacactgagtcagctgctgagctggaaccaggccccaggtctcctgaggacggttctggttttggacatggccatggcagttttggagttctgcagtagtggcccaaacaggaggaagccctttgcttgggtgcagtcacacctcattatctgggaaggtctgggaggtgcctgtggctgacagatctagggtacctgtgtgggagggagactcggaaagtgtgttttctcttgagaatttcccttgtttctgagaatgggagtggggagcagtatgtcagcactctggaggccatggcctaaagaaaatgaactaggtcagggtgcctactaagtgggctcagggcaggtggtcctgtgggggaggttgaagctgtatggcagggagatgggggacgttaatgctgccatagacacatggaggaggaaaggagtccatgagcatccttaaggggtactccaaagctgggtaaatatggtgagaagtcccaagacatctatcttgatatgattccacttctggctgaacaccctttccaggtggggaaggtgagggaggctgtgaattgctttgtttggggcccttttctctggcatcactgtgagtgtctgccatggccaacagttcattgcaaaagcttgttccctgagacacaaagttttttgcctcatgtccaggctgcagtgttgaaccatagataaaaggtgtggcaagctgacttttccatgctgggagaattcactttgtcccaataactgccacttagacatagcctgatgtgttttcttggcagttcccaggttggcatgaggggagttccaggccatcagtatgctccctgcagtgcctttctacctcccgggaggaagtgcttggcacttcacctcctgcctggaaagcgctgtgtagacagatccattaagaaggaagccttccctgtctctctgttgtgaatattcaacccttaggtcccctcagctcaccctccacacctctgcctgtgtgttctgattgtggctcagccttatggtttggggctccagggccctttccagtcaccccttgccatctgcttgggatcctgggactctgcacagtggcactgggcagcaggtgggatagatcagaagctgctgagaggaggagttggcctctgttcccccaaagcagagctgaactgtctgtgctgtccccagggtttggggatagtagagagcttaggcaggtaaccagcttggtcgtatttttgacagattcagcagaggcaagggtctggtaacagaagcagacatcaggggcaagctgccctttggagctgaggttttcaactctagccttcagttttgctcccattttctttgtccgtgtttctctaaaagttgctttactcagctcctggcatcctttccttccttggctgctccgtaagtcacaatgcccagctgctctgcttgaggggtggcagggaatccggcattctgaccagaggttatcgaccagaggaaggattcccgggtgagcctgctgcagctaaagatgtggcccatttctggaagacactctgcccctcatcttctccctctttccaggatagagcagggggtagggggaccttctatgtacatcacctgttgggccagagctccatctgagttcaatttctcactagaatggcttaacattacactccagcagactgggcaactagtgcttggggaagtatcaatgagtgtgtggtcaggggaagataaatctttcagaaccgcggagtccaggacatctgaggatgtggttaccagcgggcagcgctgaaaaatgtttatcttgattctctttttcgtcactgatacctctttgagctgggttgaacaaggacatgtctgcatgtgcatggctttccaagacagggagctgacttttggtggggaccacattgctgcttaggagcccaggagagctgatgtggtgaggaccaatgtggttttcatgagatgtttagcaggttgtggtcgaggaaagcagagcagggccatttccaccacagggatgctcagagagtacccatgtgtggagccacgtgtgcctgcaagtgtgtctgtgggaagtgagggctgagggggtgtgagcggctggtggcgtgggaatttgtgggctctggtgtctggctggcctggtgtcagtgggtgtgtggagtggggctttgcggcaggagggaacagtggaacatggcgggggaagccttctccattgggtgggatgggagggtggtcttcaggcttcccgtgatggtatttgctaaggagcccttctgctttctcgatattctttaggaagggctctcaaagtcctatatacacatgacctgggagtttggggggtgattcacgcctgcctcccacctcttcctccagcacctgaaagtccaatgggacagtccagatagtatcatagcctgaggatactgtgactttagatgctgaggcagacagatctagatttcagtactggtacttttccacacctcagtttccttatctgtaagacaggcacagcgaacctttcactaagcaggactgtaagaatctcaatgctgatggtgcagagatcaaggctgtggagctttcacagccaggactttgttctctagtcagaatctgttccaccaaaaagcatgacatcttgatctgaatagattagacccagggagggataacaggttccaatacctgggttccatccttccctggggccctttcagcagcatcacctgtagggatgcccgtatctgttggatacagtagtagttacttcttgaaaactggctgtgggttggggtcaaagagggccataaagataagttgggcgtactagagaggaaggtgcagattctgccctcaaagggttcagatttccagaagtggtgcttcaggaggttaaatgagggtaagtaacttgaatgctgtgattaaaagagatttgaatggtcttggctcttaacgcaggcccttaggaccagtgggatagaggatagcccacaatagtggatgtggctgggaggccagcatggtgcacaaaccagaagcaactaaaagcaatgaaagccatgattggaaaggtagggaagagctaggtcctcaagaccacgaaggttggatttccatttatgtaaaacatgcctgtcactgaaatgccctgggtaaggatctggggcctggggcctccaccctggaagaggcatctggagcagttaccagagctacttatggacaagaacatagatggctcaaagcagaaagctgaagcaaggcagtggctcccctgaaaagctgagtggagatgtgaagcttgatggagtatggaggggatgcagaggccacaaatctatgtgtttggtgtccagatgggcatgaggaagggacagaaggcaggtggagaatccgcacagggcctagagtctctttcccttgtgactttgagatggtgggtcccagcagggtggcaccaggccaaagtgtaatctagaggcattcaaggatccccatgaggttgttgacactgtcctcaaggttgtccttgtctctgaggcccatggagggcttctgctattcctagcacttacttttaggcatttttttaaaaaataattttctcaccaaattaccccttgaaatttcgcctgcctgagttcagcccaggaggttactattctgggaagtttcatcaaaaccctttcagtgttggagagttctccaagctgggggctgggtgggaggagaacagggcttgtctgcacttgtgttttgggggctgtttttgagaagcatcccctcacctggaggtcttcctggccaaggagctgctgtctctttggggcctagggaaggtggccttgactgtggaagctgagataggagtcccgtgctaattcatccccagtaggctcttgtcacggtctctcatggagccatttaattaatttatgattgatgttcctggactcacttgtggttaattcattattgatgttccttcattatgtaccatacaccctgcacctccccctcgcagctaccctaacgggcaggccgtgtcagaggtgggctccatagactgtaattttatccctctggggacacgtccctccacttgactttttccaatccctgtatatttaaggtccttgcatatttacgtgtgtgtgtgtgtgtgtgtgtgtgtgtgtgtgtgtgtgtgtgtgtgtgtgtgcagggggctttgctataccacaagataacagtaaggagttgagtgtggtggttcaggaggcaaaggcaggaggctcattccagtttgagatgagtctggtccacgtggaaagacttagtgtagctggggttatgtagatagaccctacctcaaagcaacaacatcaacaggaacaatcacgataactttcatcttgtgaatgccaacttgagaaatagcagatcttgtttattccttgaaaggtaaccctttcacccctccatccctgtaagctccatcttactagaggcttgaagaggttgagtcccctgcttcagggacacataggcagccaggtcagaaaccagggtttgaacaggttgagttcattgtcatgtccctggccagccctgcctctcttctaggctccatacaggccttttcctacaggaagcttttcttcatgctccactgaactgcactctatctagatagccctaagagtgtatggctctttttgctcacccttgcttcctaaagaataaggaatgagtgatgtaacatttgcttagtagagatgccagcaccaggctaagcagtccctgttccttagctcattccatcctcagcaccccaggggcaggtggcatgaacactttttatagaagatgtttagaaacttgctaaaggtcattcagctgctggatttgagggtgtctaagtctccttgggactcccccaccccatcagtcagctatggattgtttatcaaatagcatacccccatgtcctgtctgacctgtgtcaggcccctccaggagtgcccatttccatggggtggggcggtacttttggagacatgaagtgtactgaattgggcctgcattctgttcctcaatctggacatctatgtgtaagttacttgtcagttctgagcttcactctccgtgttttcaggccagcagtaaggctattcatcctggctgccctatgtttaaaggtgatgctgggtgggaagggaccttgggaaaacaatgggctaaacaaagtttaggattgcctgtgaggtccctggcatgcagaccaatagtgcttacggctggacacacaaactcaggctgaagcatgtatacttaccctctaagcctcccagacaggctttgagagaattctgtggcttgccagctgccaggaacttcagaaccctgtggtgccaggaaattggcaggaggtcctgagagagtcattggtcctggtctaagtttactggttgtctgagaagtacctgggcccaggttgtatgaagtatagaggactctccaggattctgggccctgtttcccgtttccatgtgcatcctaactaggtcaattcaggctgggtttagtaaggaagagaaatagtttgccaggcagccacctagatctcttccaccccaccccctaaaatatgcagaagcctgggagagaggtgagccttgcatcccggaagcaggacaccgccaggctctccatggcagagttcccagggcgtcagctaggaatcctctgctttctcatcagctcttcccagcgcccatcagctcagcgactggcaggagctctctcaggaaggccacggggttctgcatggttcagcatcgatcttcccagggccccagaacagaggacagagcagaggactgatttgtgggtgggggcaaagcaggcctggcaccgcttgttggaaatctgcagccatgctgccgttaggttcacttcccaagtttccgccttctgcatgctgggattacatcaggctcccctggcacgccctgtagcctactcccacttctcagagctcttccactgtcctgggacagctgccctgctgcagtttcactgcaggcaacagaatggtagctgaggagacagttccagtccttgcagcctggaacctccagttccctatctgcttcagagactgcctgtcacccctgagtacctctgtctgtctgctgattcaatcgctctgcttgtaaagaacataggtcttcagaagctctgtgtaacaacagagcttcactggagtactacactgctacttgggcgggtcatgtgaccttttggtttcctcttccaaacaggggccaggggccctgctggaatgtggcacattggtatcagatgacacccatataggaattcctgcccagagcctagaatgacaggttcccaatgctggttaaatgttgtcagtaactttcatgatcgtttctctctattgttctagcagccaaggccagtgccaagaccctctttttcccagtgctgtgcctcctctgaagccagatgacccgaacccttcctcagtgcaagccacgcctcttgggcatccctccctgcagcatctggacctcctctctaagttggcactgttttgctggtccccctctggcgtctcaccctgttcacatcccagcctgctctgaagctggccttcccaacccccagctcctattggttcctctcctattttggtttgtttccctctggcaccccttccatccggctcttgcttttgtctaacgttcctctcctgaggcctttggagaagccagtttctcttagctcctataagcaaagctatgtgccccccacacacacacacctccccaggccaccttggggctgtaggatgattgatgatgtatctgcaaaccagattgggttccacagtgtggcctggccttgacagcctctacaatggctggagaatgaagtgatcccaatctgtgggtactacagcatgccccttgaggcttgaagtccccctcggttataaagatgtgaagtaaaaggccagaagagccaagcaggcctggagaccttccacttgccaagcttcagttttggtcaggctgttgataaaaaggtcattagcaagctgagctcctactgtgtgctggattactgtgtggaactgggaggcataagaggaaagtcaccagattcctcctggttctgttagtggctgacacatgacactgaagctctaacagcagctccaacacatattccctagggtgtccttccagacccagttcaaaggactccaagcttggggtcacatttaatgcggcgtgttggcagcttctgtgttgtggacacttatcccctttgcactcaagactgccccatggcacctaacagtgttccatagctgaggagagagtagaacctcagcttccttggattgtccaggaaatctgttgggagtcacatctcagctgccactgtctgtctgacccctactttcagggtgctgatccttctcggtgccttcaacttgcactagggactttgtaagccaggagacagccatcctctctttgtgtaccccattgctgagaaaccggatctcctccactcccaggaaaccctagctctgtacccagggtgttggctgagttgtcctcatcgtcgtctgtagctgccttgttgctcggcttcccagccctgtcctccccagaccccacacctccctggccctggccacgccttccaggctcacacaggatggtccttctcacccagcatgccccctgccagtgctgttgagctgttccagattgttccccctgctgtctgcctgctgtaccatgcggtttaataaacaggctaatggagactctgggtacctcaggagccgccttctctgtttcttggtccctttagagggcctgccccctcccttccccaggtgaggcccattcagcaggcttctgggagcggtaactaagctgggcgcccagcccaccacctgctcagtactttataaaagtttaaccttaatgttgtaatgaactcccatcataaagcagctggagcagtgcatcctgggatgtataaattataggagccctctgaagtcgtaattggaaatggcagcaactggaatgttgaaagaagcgggcctcactgggctgagcacagctattctctacttcctttcaaaaggcacacggaactgggtctggctgcgaagaaagaatgtcctcagaccaaactgagctcctggttcctctgccccagatcctacttcctgtccccagctgtgtctgcagagactgaaagctttggaggcaggacatccaccctggctctgagctgcagactgcaggcacagtgggccaggaggaaacagggctgcagacagacagtgggggtcagctacagcgttgctgaccagggagggctgcagagccattgatttgacttcccctctgctgctgtgaccctggcttataactgggctgcagcccagctcagaagtgggactggcactccctggggagtagggagtgctctgatgtggggtttgtgctgcagcttctgggtccttcaccaagtcatttagccttagctgaagtccctgcctacagactgggcatgactggacctctgagaacactaggaaggaaacaggggtgttctctctgattgtttgtcccggacaaacagccatggtgctgttttgacactcacatgtcatgtggggagcttgctgatgtcggccctcgctcagacccagatctgtatttctttttttgttttgttttgttttgtttttgtttttcaagataggatttctccatgtagccttggctgtcctggaactcactctgtagaccaggctggcctcaaactcacagagatctgcctgcctctgccttccgagtgtaccaccactacccggcaagatccgtatttctaataagctcagtttctaacttgcagtgggctgtggctggtccatgtacagtggtttgagtggcaaaggcagtgtgtgactcttagtgagggtgatgtgtctcgacactgcccaggactctcacaggtacttgccttggtactgctcagcactcctgaatgtagccccactgtggaacaggcaaacccccatctgacttctctgagatggaaccctgaatccagcagggcccaacaatggatgtttagtttcttcatgcttagatggcagctctgttggggcctactctctaaatcggggctccactcaacacattcttgggccccaccttccactcactgattcagaattgctggatggggaagtgagaggggcacagggaatttgcatttatcagtcagcactgctatttattcccctttgcacatctccaggaatcactcactaccctagagctgtgtgaagggcagaaccctgactcctcaaactcgagagaacagaagagcttctggcatggttctgttgtcaaagcctagagcccaaaggtatattccctagtcttgcttcagaggtttcctcacagcaggaagagggagactgacacggagggactgggtgaataagctccagaaattctgctgtgtggaggagagatggtaaaagaccatttgatgagctgagttcactttctctagttccctaaagagaagtggcagatgccaagtggccccatgcattagttgcttttctcattgcttctttaaaatactggacaaagacatctcagaaaaggaagagtttattctggctcatcattcaagtccattatgtcagggaagtcatggcaccaaaagcctgaggcagccggtcacatggtatccaaagtcaggaagcagagagagacagatgctggtgttctacttcctgtctctttttatttagtctgtgactccagcccatggaatgatgccacccacagttacagtgggtcttcccacctcagttaacccagtctccagactctcacaggcatgcccagaggtctgtctcctaggtgatcctagatcctgtcaacagtaaccatcacacactatatttggacagagaaaacaaaggaatagatggttgttcatagttaattttcctagtggaattgggggtggcttctggttcttttattgttagtggtggtggtttctgttttccatagagaacagaatttcatagtaaagagaaaaatgtgacataaacatgtttggtccagagtcctggaacacagaagattcacccagtatgagacaagaggcctccttggctagtgaaaattcatctgccaggactgtggcactctggccaaggtaaccttgtccagtctcctcaccttctccaggtcctggtgctccttgtccatcacattgatctgtttcttgcttctctctgtttctgtttccctctggtgatggtaaagacaccatctctggggggctggagagatggctcagaggttgagagcactgactgctcttccagaggtcctgagttcaattcccagcaaccacatggtggctcacaaccatccattataagatctggtgccctcttctggtgtgcagatatgcatggaagcataataagtaaataaaatcttttaaaaaaaaaaaaaaaaagacaccatctctgctacacaggaggaaggtgtggggagagacagccaaaagccccctcatgcagtacagttcattttccatcagaatgtgtcacctacgtgcccaaacacaaactccagaatctaggctcatagagcctcatgctaagggagtaatggttgactaaaggagacatgagtggcatttctgatgggccaaaacccaaagctgtgtgtctttggccatgccaaaggctacgggtccttgtctgtagattgtgaggatggagaggcctgaactctaactctggcacttacttgttgctctgctctggtctgtagtgtgttgctttccttcccattcctcctctactgtctggtcttttgagctgcttaggtttccggagaagacctctcctgtctgttcagctgccaggtttgtatctaagtggctgctggcacatggtcccctcgatagacaagggcttgatcagggctgtctgtctctggtatctaggccttcatgcctgtggccatagggatatggtgagtggtgggagactgtgtagacccactgagagacctagggggccctgagtgaacctggccctgaggttggcctccaggatctcgtgggtggggtctgccctgctttctctctttctttcctggtctgagctgcctcatgagtgccccaatgcctggttttgtgtgtaagacctcacttccagcagcccagcaaccctgagacttagtgctttgagctactattttcctttgcgtggctcagtttgtgtggtgtgtgtgtgtgtctgcacacacacgcctgtgcaaggggtaggagaaagccattcatgacatttgagtaaacccaggagatttatatggccgaaagtttccagtcttctttcaacatagtggatgggtttctgaatctctcccaccacccacttccctaccccggaagtgcaagaggcccagttttaggaagaaccaagaaaggagaagcccagcaggagctgaagatcaaacccagctaacaggggctggagaagcctaatgggagctcttccagctgtctatcacagcccacaccccttggacggggatctctaatacctgcccggggcacagccagcaggcatgtgaccccagaaagtggagaagcagcccctggcctctatgtcttctccagtgtgcaccccctagtccaggaacccaggggagctactttttcacgtggcccagagaaggttgtggggaactaataatgatgctcagctctggggcctcctggaggcagtggcaggagagtgggccccgtgcaaggtgtatctgccatttggtcctggggtggaaggagggaaggaaatatgagccagacaggcatcttcccacttggatgtctcttctgtctgctgactgagcactgacccccttctgaggtctcttgcattgtaaccccatactgactggcccaccttgggtttccttgtcaatctgaccagagaactcctagaggttgaactgtggcatcttctgtggtcctgcagaatgtggccaatgcctcctggtctgggagttcccaggccatagcagaaagggatagaggtgtgtgtgtgtgtgtgtgtgtgtgtgtgtgtgtggtggggggagaagagggcatcctgaggcaggatgttacagctgcaaaaagcagcaatcttttttgcactgtcaagcaagccgcaggaggtggccagtgacctctagcaccaaccggtctggtgggtttacaggcttggccatcttttctgtttcttctagaagaggacttcttgctggctctgcctggttccctcctggccttgttttctgcttggcctcggtctcacctcctggaaaggggatggggtggacctctgggctgggccttggtcctccttccatctggcttgacaaagaggaggcccctcaagaatgaggtaggcccccatcatcttctggagccatacaggtgccaaaacctggaaagcagggtactcagaggccagggtacctggcactgagcaggaaccgccagggactcctctctgctaatgtgccatgcctgatgggttagaggctataggaggcagctgtgtgcccatggcttaccgaaagggtgcccatggcctaccctgaaaagggtgtctgcagtgtgacttcctcctgctccacctgcctatctcttctcagggagcccgggtgttcctctcaccctctgtgggaggggctggatgccccactcataggtgtcagcggaggctctccagtggtgggtgctaatgctgggacttccctggctgactcacactgggcctgactgtgcctttgctgaggcaggagttgtgaaggtgtctgggtggtgacagcgactcacactcagtcccaggatggggtgagtcagtacaacattccagggataccagagcccacctcccctacttcccaacatgagacaagtaaggctcaggtcttgagcttggctactcctgaaaattcctgggccgaaggccatcctggccctgcccttgacaagagaccacgggaataaggaagctgttgattcagaggcactttccagacacaggcagggccaccaggctgaggactgtgagagacaggaagtggggtcagcccagtgacccagctgtggccaaggacccctggggaaaaggagaacactgttggctccccccacccccaccaaaaaaccgacaggtcctgtgttcttggtcctcaggcctccctcggcaggcaggcgggaggacagaggtgttgcaatcacagtgtggggaggggcggggcgggggaggactgagcatacagcactggagtgcatggcttgctagcaggcctgtgggggcgatggcagcagtgctgcgtggggtgagctgggggtgggttggggggatgtgcagttctgggtgactagccccagattctctgtcttcctgtttccgatgggggagggtgttgccccctgactccctggactagcgtagctgtggggatggttgcctctagaagtgagcattgggaccctggcatgattttagttatgacacgcatccatccagccttgtgagaaatgtggcagtgtgttggtcaggtgccagagccagcacctctgacaagcagggtatctgaatgtctgtaacacatctgggctgaagggtgcagattccttgtagacaggcacagtggtgaggtgtcccaggcaggaatgaggctggcaagcctaggcttgaccagatttaagcctaacctggtactcagcttggcccacaactggggaagggagcaccgagactaagccagatgtgacctaaaccgacaacatacttgggtgacattaaagagcatcaggttccagctgggatggttcttcccagtgggtgagcatagtcttctccctctaaggtgctctctttaaagaaaatgtgtcaagctgtgtgtatggaagcagggtagccctgtgtggtaagttaggcattgctgaggacaggaaggtgacaccagtcctataccagggtggagcaaagctgtaggaacttggggagccggcagagttctagagttttcttccttcctgctgatgagtgcatgtggactataacaggtctttgtatccttggtcttcagtggtgcacatctttaatctcagcaatcgtgaggtagggcagacagatctctgtgagttcaagaccatcctggtctaaggacagccagggctacacagagaaaccctgtcttgaggggaaaaaactagtcaaggaccagctgaacagtggtggcccaggtctttaattccagcacttgggaggcagaaacaggtggatctccgagttcaaggccagtcaggtctacaaagtgacttccagggcagccaagactactcagagagaccctgtctcgaagaacaaaaacaaatgaacaaaaatagtcaaggaccccagaaccttgtttgggtgggtcctagttagccaagccccactacagggaggaacagcgactagtcaccctttcttggactctctttgcccttctcctgtgagaatgatggggtgaaatgaggtgatggctggaagagactcagacaagcaactatgttttccgttaacagtaactgatactgttgtccttattacccttacgtttaagttgccattgtcatattatagaattgactccccaaagtccatagcatcctggcccccatatgctcaagaatcagaaggccaggcaggtgcagctacagagtttgggtgggtaggactggccctagcacccctcagtggcctctcaggtcttggctgagctgcctgctcccatctgcagagaggccaccccaccctcccatgttggctgggagacctcagagctaggagcgtgtgttctccaaacatcttgctcacagcagatggcagccacaactgcctttctccctgcagttccggtgcacctcccttgctcaccccctgttaactttggtttctgcttttggagatggggaggcagccttcacgtccccagagctgcctctgattgtgggtgaagattgatgcatgcaaggtgggcactttcagaaggagcagaagcctcgaactccccagctcagggacacagtctcgctctgttcctgctagctgactttgaatcctcttggctaagtgtgctggcagcgtgatctgcggagcaaggagctgggctggggccttgtttgacatttcttgagcagctgctaggcaccaggctctgtgctggatgccaaggacatggagatgcagggtgtgcagccctgccccatagcagcccccagccttcagggagtgcgggatgaaggagcatcagctgttccatctgaggggttggtgggccccaacagtgtcttggaggggttgtttaggggctaaacctgggaaacctgaacagctctgtaaacagcaagattggggaaagcattgtaagctgagaacaggagacctgaagagccctgcctgcagcgcagcccaactgagacacatggaacaaaagaagaccacattgcctctactggaccctgagaatatagcctgttctctgttagcatctaggttggggttctaaagccaaagctccaaaagtgagtggcaggaatcactctcagttctaggggttctgccctgggtttgaggccagcaagagcagaccctgacactggagtagatgtggcctatcctttcctcctgcctggtcctatagccacaggccagtggtcaggtgttggcatggtttgtccatgaggtccaagaacagctgggtgagcatgctagacccctctagcactactcctcattctgaacctgcccccaggccacccacacccacaggcagctctaggctaagcatccatgcagtgagtggcttgtgtgtgctgaaccctgtgtctgttactggagctgttagggtcaaagcctgggctctggcagacccaacaagctagattgaccatctgttccctgatggccagttagagacaagcagtagtgaaaagagagagctcaacacagccatgctgaggggaagaagacatggacgggtccagtgacccctccacatctgtctccaggttcctggcatgggggcttaggtctaaatagaggtcaagaggtacgtttaactaaacagtcctggtcagggtgtggcccactgatcattgactctgcttcagtctgtcctgtaaggtggtgaggattatgtgaaatctcttcctaggaggcaagtttctcctctggcaccaggcttcagcctttctcgtccccagcatgggattcctagggacattttaaaattctttggggactattgtttccatagcctgatagccaaagggaggggcacaagaatctctcttaagagtatctctcctgccagacgcatgccaaggactcccacaaaagcctcatccaattaactttgaaggttatgagtggtaagattcactggccccaatgccctatgacttgctcaaagttcttcagcagactctaagcccaggtgagcctgtccctctccagcatgtctcctgtggagttactcacccagtcccctagacaaagcttgaggggaatgtgtggcaggcctaggtgggtggcaggcaactgtcagagcccagtttggaggcctcggggccctgaccattgttgctgcctccccagtttcatagtcaggccctctgggggagctcatagcagggaggcagctcatttattctttgagactctccagctaccacagcccaagtgttgggacactcgtgaccatacaggcaggcccaccagaacacaatccagcaaggcagcgggcagagcagaggctttggtgtttgctttttcctgccccgccttttgctttgccttttgtacctgtctgactgtttgcccaaggatttgcccttctggaaaatgggcgggactgagcaggaaggcaggcaggtggcaatgcttcttggcacccagcttttctgaagatcctgtactgcacgtgaacctgtaccttcctgtgctccctgacactctcccagccagtgcatggcctcgcccgcgcagagcatgtgacttcatattgcccaggcctggcatgcctggcatgcctggacagcagcagcggcagcagcaacagctggactgtcagctaggagcaggagaggcccccagagccctgttctggggcactggccccaggatgcgggggtgaggggcagcatgaatgggacttttgtatggctggacagaggaacacatggccagagccaggagccctgtacacacacatctgctcctttctgtcctggaatggccagtctgcaggcctcttacccttcctcctagcaggaaagcttgtcttggtccaagccatcctatccctgaccttccctcaccccttttagctgaatctgcttcagcaacttgaacttctcctctgctgttctgcctcctaaaggtctgccctggcctgacggagcttatccacaccggctcctggagactgtgatctgggtcctctgggtcaaagggaacaggctaaataaatagtaactagatccaaggatgaggaaccccttttctcctttagctggcagcccaaaatgggacttgcattagctaggcaagcagccaggtacctcacttcctgtagacttgcctatggccagccttgtggagtggttccagtcctagaaaatgggaactctaagcaccatctttgagtttccattctgctttatagacacctttaacaaagtcaacactatgacccataacctctgtgtcactaggtacctgcccacgtgagccatgaggacaaacagactgtcacaaagaggctgggctatacctcctatgagtgaagagctttgtaaacccagggtggctgggagagcacatttgctcagacttggtaacaacctttccaagtgggcacaacagcaagaggttgcctggtcactttcagaatggcctgggagagttcaccatgtgctaaggatgagaaggcagtctgacatgacagagataacctttggcttctagctgtggagatcctgggtacccaagactaagcaggatgggtgattctggtatggacatggggatgggggaagttgtctcagcatgctgcttggtaacaagcatagttggctagttttggggggtgggcaccacagagcccaccctgggggatttcttcctatgccttgtcctccagtggtggaaggaatgcccactatttactattcatacacaccttggtaccaggtgcctgcatcacttctccccatgagcaaccctgtggtctgtgactcccgtcattctcatttacaggtaagaaaactggtctgaattgctcttccaccagcatcccatagttgttattcctcttctccagtcatcggagctcaaagagaatgcaccttgcacataactgttaagtgaccaggcccagttgtagctcacactgactgaccccaagtcctgtgcgtttcccactctgcccctgcagtcaacagaactactaataaaataaacacattaatacataattaatcctacctctatccctccggccttttctctctgagcacttcccagacgtgatctcatgcatcctgtcaaagccccagaagagctatgaggaggctctgtgcagatgatggggaaaggctggcacccatggaccacagggacttcaaaccagccattatccaaccttagctccagcaccaaccttctgcccttctcagctctcagcctccgagtaagaagtattagggtgaaaactcctccgtacccttccttggtctctttggaattgtcctggggtaagcaggaagaagagtatctaaggtgaaccctaccaccctatggcagggtgtcttgtgggcattcacaggagtaatggggcatggccattgtaatacttccttgtagcaagctggcagagggcaaatgggagtcccagggaaggaggtagaatgagtaagcatcccaagagcaggctcagtgctctggatcttcctcccttccccagtggccaaggatggagagactgcttctgtcttcatcatatgaagaggagcccaggcttagagccttgcctgggtcacacggactcacaggtgttcagtttgaatagagttgttctgggagacttcaaaaatagaaccccctatagagttaggccataggtaatttctgtctcatttataatgccaagagcatagcagggtccctgagaaaggcaacagcaggcttgagctccttatctcctgggagcttcatttctgaggcagaggctgaagagggtagaaactgaggatgccaggaaagaagggaacccagagacaaagtctttcctgggccctgttctttgtttacaggcaggcggccattgcatccttggtcccaggccaaggcacaggccctgtcattgggagagggtttgatccctctggctttgtcctgaggacacaggccttgggactcttctctaagttcctccttccatctctcctagattcctatcaaaggtggcacaagtcccactgcctaggaagacctggagctcagatctgggagatgagggggaaccagacttatctctgctaggaagccctttaggcaacagaacctcacttcgctacaagaagaccattcaacctttctttcctgctaaagcttcctccatagaatgaagataccacattactcctgccctgcccaaagcacactcactatagcaggagctcctgcagagtttctgctacaggggcagttgtgcttggactttgacatcctggcaaagaaagcacttcagcctagccatcagaaccctgggttctgggcacagctctgcactgggtgctacatcatctctttctgtctcttgggctttgctcagaaatggttcttccttcaggcagcagagtcttggtgacctccttccacctgctaggccattttctgggtgctgaggacatagtagggaggagcacaggagaggcctttgcccctggggagccacactgtggtgggagagccatacagaaaagtggagagtattaggcggcacacagtacagacgaaaacgcaactgacttgtgtgatggagaaggctgcctgagacagggcaggcaggcccaaggcgaggactcctgagctgggaactgaatgacaccagagcggcaggcattcagagacaggttggggaataagcaaagaagtaagaacagagtaaaggctcatgtttaggaaagagatgagacagcatgagaggaggtgaatgtaggcagagaccagctcctacaggaccagcagcccagtgtgagaggaagaacactgtagtgtgatgggcattgtgaaatgagtcaaaataggagagatacagaggaagaaaggatgtatagatgaaatgcttaagtaaagtaagttgatggacagatgtattatgtaggtcagagggtagatagaagcgtggatggatggatggatggatggatggatggatggatggatggatggatggatgggtgggtggatgcatggatggatgctggagtgtgtatatgtatgcatggatgggtaggtgcctgggtgaatgaatggctggatggatacatggatgtatggtttagtgaatggataattggatgaatggattggtggatggttgacttcagatagatttgccctccatttccttccctgtttgcattagctgcattcttctgagtgaagccttcctgtatggttattatcatggtcagggctgggtgacaacaagagtgaggaattgaccattcaggggaagtgcctcaaactctgaacatactttgggaacagaacccagtgaccactccctagtgttaccctccatgggcatgctctggcttattcgtgcgcaggtcatctaaatcagaactgggctgaaccagaactctttggaaatatggtgcttttgggtgggggttggtagctccagaccttcgatttaaaggcatccctacaggacctactgtccactgcccagcccggtgtcctgcctgtcactgttttgaatgctgactctcaacctggaccatacacattcttttacctcacatctgcctcagctaaagtcccacaaggccctgtcatgctgtcctaccaatctgcccctcagctgtctctctgtcccttccctgctaacctggacttgtccccactctctgtttcctcacatgtagcttgtatagaggtgtttgctctgtgcttgttcccctcctactctctcctgtggtctctctgcctcgattgacccaattccagctccatgttctctgggaggccacactcaggactgtgtgacctctctgtctcttcatatgtgaaaattagcatggcttctccttttccttctggactgtaggtgccatggaaatctgacctctatctccaccactccatctcagcttttcttttttcccaccccataggtccttggcgtgtggtgggcactctgattgttcagtgggtagagggtggctacaggaaggaactgcttggccagatcacacctatgttcacatggccctgggatctcctcagttagctgtttcttgtcttctcttgaagcctgccttgtcccaagctaggaaacttggaaccaaaccccagcactgtgaggattgatgtccccactcttccatgtctggggaccaccttcttccctgtgctcctggtcagccagtctccctcagaggcaggctgccaggtaggaggaggaagctgccacctgtctaaacaacggctaagcactctaaaggtccctgacaaagtggagtatgtcccaaagaggctcccagggtgatgacatgtttggaatccagtttgaaccaaaaaccacacagagcctgtgagaccaagaaggtaaagaagatggcttagaatccattggctttggagctttctgctctaagtgggggctctggagagagcccaaggcccaagaggtggggtagtggtacagatggcagcaggtcttggtgtctggtgttcttgggcactgtctctttggtatctagcctgtgaagagggttgaagtcaaagtactgtcctttgggtttggggtttcccatggctagctgaggcattgcttgggtcttggcagtcgctctggtctcgccctgcttcagttagggagctgactctccagccgcaaggatgttctggtcagacaggcttcatctgaaatgagcagggagggggccccaggaggcctgcaagcccacgattctgggtcatctcctgcagcatccagagaatgaagtggtatttatagccgccagggccactgagggtggagaagtcagcacgagctatgacgcaggcccgacccccctcactgccatcccccactccagagccttcctgggatgtgcaggaaaggactatgactgctgaggaagcaggctttatcacattgctgccctgagccctgggggagatgaggtactagtttcagcctggcaggaacctcagcctctctggtctcaccacgaccttgtctggcctgaagacaccagatgggcatcccattagcactccgctgccctgcccgtctttcatccacattgtcacccgctctttccttaaaaggtttgccccccctgaagatagggtccactgacctctctcagctaagtgagggccagcacagaggcctgcctcatccttccacagtgggcaatagcctcaggttgactgaaacagggcctgccaaacccccgctgctgcccctgctctggtcttgtcaagtggcagcagggggcccggctctacctccttatgcaccaagagagtaaaaccacagaagtgacagtgtggcaggtctggacacctggctatcaagggcaaggtctctgggaaggaaggtaacaccaaacaggctgggacctgcctctgccccagccttaacctatcatgaacaaagagggccatgagttccatccaggtaccacatgggcagcttccgcttggaggaatgtaagcatgtgccatgtgctctactacccagtgcctcttattttcagccttcccggttgctcagaatactggggcttatgccccagaccaggacagaagcaggcaaaaaagttttctcttcaggaacttgccatgtaacagagaatgtaaagtcgacacaccagaaatctgcagaaagtgggccacagactgacccaccaccagggctggagcttggggacaggtgcctgaacagacctccaaacccccgacagtagaagcacatgaaacaagggggccaggagaggacgaagtctctggccaggtgcagttggggggaaccatggacaggagcaggacctggcacacaagaaagagttgggatataaaggagggtcttggtgatcatggcagatgcagagggtctggcctgttggtagatagctttagagccaatgcgtgagagctttaattttatttaaaggccatttaggaactatgataggccttaaaacaaacaaaaaaccttcattgctgtgtatatgatgggggagggtgtgcatgcattccataccatgcctatgaagtctgaggacagttttttggagttggttctgtccatgggttccatcacactggggttgtcagcgtgtgtggcaagtacctttacctgctgagccatgtcactggctcatgataggcttttgaggaagggaatggttcctaaagcagtgtgtccatggaattcatactaccaagcaccctgtcagagttggcctgctctctcttttttcacatttatttgtttattttatatcctgaccgcagcctcccctccctctcctcccacttcctccctccccacttctcccagagcctgctctcaacactctacaacattgaaatggctttgtcctgccatcccccagcccacgagggaagtgctgtcatcagtgtcagccgtttactgatggggaaatggttgttgactcatcgtaggaagtggctggcccctgtgttgcactctgaagtcttcgcccagtggatggctgagaaatagagtccctaggaccagtgccagggccagccagtgcaccacccagcagtagaggcctccagggcactatcccttctaggaggcctatgtaacttgtgatgagtccagctttgtccttctgagaactaggagggacaagggagtgtcagaatggaagaagctgtggcctgagggcacaggttttctcctatagacccactcttctgccctcctatctcaggcaaggaagaagacctgtgtgatgtctcctgagtccaggcacctaagtagcagccccaaggctcctcctaaatgccagaattgaccagagggctcctcccatctcatggttttcaggcattttttgagcacttagttcaaagccttgcagtgcatagaacagctaaagcctgctccaagtgccaggctccagagacctgcctgccatgaacacctctctttatctggagtctcctcaattggcacagaaagaaggagagccaatcaaatgatacactgggccatagcttgtgctgatggtggtcccatatttcacagttgggagataggggtgggtgctggcccttcaagtcatcagagctctgtagagcagctccctggggaaggagctctgcttgctgtcattcgatccctgctggctttgacaatgactgggtagtggctgaaaccccagagcctgagcctctggcctgtgccctagatggctgcactgcccaggaggtggccttctgaggtacacagagctcatctggagtctttctctcacctttgaacagcatgcacccaagcagaccagatccaagggctggcctactgcctgaggaggtggggctaacgtggctcagagtaggctgggcccagggggtgggggtccccagaggggaggtgtcctgcttggtgtgcccacttaacacctcattaacgacctcattagggatcccttaaggaagccggaaggtgctaattcctctctgaggtgtcgccagcaccagagactgacagtttcctctggaggaagttctgaggagctgagaatggggtacagctgagatctggtgaacttccctgcagaggggccatctaggaagctgaatgtgtggccccagcaaaagggaaactttctgggaggagcagtgtggtggaagaggagcatactggactggacggggcggggagcatgaaggcactctgtctccagggcatgttgagcttgagtggctgtgtgcagtgtggcagcctgaaacttggttgcacagacagataggtacacagctttcttataggaatgtggatttggagtgttctacagccttgtggccttggccgagagctcagtattccaagttgttccctctatagagatggtattcgcacctcactgacttgtgggttcaaggagtcaataccctggtagtttcctcagagatgccaccaagcctacctgtgaagatcagacaggattggggtaggtgcaggtctgcttgccccagggacttagtgttgcagggcagtagacttggtgcagaggtaaaggttccgtacacactggggacaactatgaatgaaccagatcgggctctgtgatgttctcacctgcccttcacagccccttccttcatcatctcttacacacaaggaaactgaggctcagtgacatgttgagcacagtcctggagcagtgacagcaccgagatctagcactgagatccagcaccactcagccctggtctacatgtgagatgcagacaggcagagggaaggtggtggttgctcttggcgcagcctccaggtctatgtacttgagagggagtggttaggagatcccgtggagtgagctgactgccaggggtggaacgagactggctgcatgcctgctgccacctgcctgctccagcccaacggctcccaggacaagagtgccacctgaggccagcgtagcttgcctgtccctgcaggccacctctgcccagagaactggaacaagcgtgaaaggcccatggggaggaaaaagaaatgatttctgagaaagaattcagtagcaaagctttgcctggcagcaactagaaggatcttccatcttcaggaaacccttctacccaggacagaatgtgggaagtcaggtccaagctgccaaagagagggtcctgccactctttctggtcctccctcccccattcctcagcagccagcagccctcccagagcagccagcaggaagcgaaaggccccaattgattcctggggagttggctggtgtcagtggcagggcctggtggcagatggcaaattcctttcattgaagaggagtggaaaataattagcgtgagaacgagaagaggagcctggtgataaatggagtctggtgagagttcgtggggaggggccagcagggccaagcagaggctctggagccttatgcctgactccagtgttcactgaactgagtgaccttggcatgttatgttaacctctttcagcctcagtttccttatctatgaaatggggagaaaaatagcagttcatagagtgttacgagtattaaaaagggattctgtcactgctagataccatatctagcagcagtaaacactacataattaaaaaaataaacatgggaggctgggaaatggtggtgctcgcctttaatcccagcactcaggaggcagagacaggcgcatctctgtgagttcgagaccagcctgttctacaagagctagttccaggacaggttccaaagccacagaaaaaccctgtccttaaaaaccaaaaaataaataataaaaaaaaaaacctgtggctgggcgttggtggcgcacgcctttaatcccagcactcgggaggcagaggcaggtggatctctgtgagttggaggccagcctggtctccagagcgagtgccaggataggctccaaagctacacagagaaaccctgtctcgaaaaaccaaaaaatagataaataaaaaataaataaacttgtggctgaataattgttggaagcttgtctagttaggtgcaggtggccatagtatcgtggtagggttggttcctgatcaccccatccctgtaactccatgccagacccctaggtggtgcttttataggaaaaggtcactagcccattgatgttacccaccgaacaacaggactggcttcacagcctgactctgacccatgctgtgttactaacttcatggcacctgggttctccccatctgtgagatgcagacaggcagactaacctggaggagtgtagtgaggacccctaatggtgagggatagaggacgtttaactgtccttcaaagcatgggttggggatgaagatgtggcaagtgtctgtgagttccaaaccctggctgggggacaggaaactggctttcctctcctggcctagctgccctacccacactgtctatgccccatggggccaggcattcgagggccctctcctgttgaaattctgccttctgctccagcacagctgatgtgtgaaaagcaacagctttcaggcccctaacttgggttgcacacgcccgggcacaggctggtggcgcacgcggccctcagcccacacaactttctgtcacctcctctgccaccgtatcccgtcctctgttttcaaaggccagctcccctggccacccttcccagatgagctgcaggcctggaaaggagaaagatgggacagtacttcctcagggattctggagtagtggccctggtgtgtgtgcctgagaagatgatgtcagactgacagcgcaggctgctcttggtcctcactgtgggatcttcaggccaaggccttcagtctgtcctttggtccctggcaattctaggttgtcagtagacctgagggttctagtacactgaataccacacaggggcctcagctatgctcaggcctatggcagccctatagggttggcatccatccactgtcactacagtcttgtgaaggtggcagcccattttacaaaggcaggaaccacctagcactgttgttcatattgtcggaggaggctccactgagctatccaggaggcactggctggcaggcagtgtggctgtaagccaagggctgctgttgtcctcctgaccagacatggcagttgctggctcagctggcagctgagccttggggatatggtggtggtttggggtgatgccactgggccttgtatggacacagaagtcccaatccccaagactcggttgagaccaggcaatagcagcttaactgcaaggcagtctgtctgggctgggttgggttgaggggcctgcaggccccataaggtagtgatcaagggggtcttcaaaggggagatgacttttgactggcctagacagaagagtaggagttgcttggcagaagaacagggtagccgaagcgtggtttccactgaagcctctgcagaacagcaagcttggggcatttcaggaagggaatgtgtagttgtaaggtgttggagagccttcctagctagaaggttcctgtcaccttagggcaagctgtgtgcaccagaaccctttcagctgggtggggtggggtgggggataagggcttagaatcagagaaggtgcccaggtttaatctgcagtaccacataaaaccaggtatgggacacattacctgtgattccagcactctggaggtagagacaggaggatcagaaattcaaggtctaaacacagagtttgagaccagcctgagatacagaggctcaatgataataataatgataaatcaatagagaagacagcatgtgcattttaaaaagaagtttgcgtttttagaaagaggaacttgcagaatggtcaatatttaacccagaggcctgatcatcactaggaaaattgggagaagacagagaaagaggccccttagggctactaaagtcattccatgaacacgaaaggctctcctggtaccccttcataactccttagggcccagtaccccttcacacctccttagggcccagcacccctcacacctgcttagggcctggtaccccttcatgccctcttggggcctggtacccttttataccctcctggagcctggtacccctcatatcagcctggggcatagtacccctacacacccacctgggtcctggtacccctacacacctgcctgggtcctggtaccccttcatatcctcctggggcctggtatcccatcttacttgcctaggtacttcatacccgccttcacatctgcctgatgtgaagaggtacaaagccttaagcagagctcctgctggaaagggtgtgacctgccctggaagtcctcagggtctgggaggcagagtcctgaccccaacacagtttaatcattaggggcccctcttgtggtggagaaagggagtctgaggaggtgctatacagttgccccaggccaggaagtggccaggccctccccctcctgagacatttcctccagatgaaatcacaccccagcaggggaacaggcccccattgtgatgggctggggtctccagagaaaggacgccttttaggcccataaaaatagaagctttaggattcatgaatctgtacaggggatgcccggctcccccctcctgtgacctggtggtgaccagctgaagattccagccaggggttcacacgcactctctcagccttccacccccacagacacactctggcatttgtccagcgttgtgagggttctgcagaccttctctcttggaattctggctggaactttaagagggaagcataatcggcatttcacagatgaggagactgaggcacagctagtaagttacacagttgggtggtagatgctagacttaaactcctgggcctggactcccacctactgagcctaggaccttgtgttagctgccctgagcagaagctggaggagaccttggaggggtatggagcccccatgccagtaacaggatgtgtgtggggtcagtgcctcaaaactgccacatgatagaaaggccctggtgctgaccacagctgttagccacaaactggtcatcgtctcacccccagagcagaggctgctattggccctatcattccaatgttttgatggtcctgcagtcacagctacacgttctgaggccagtcttggctcactgttccaatctgtgagctggagagggcactgcaggccctgtaaagccgggccagagttctaagtgagagtactagggtgttgggcatctagttagctacagtgtcagcctttctagacttcttgaggaagggtgggagagaggagatgcccagtgtgactgagaaagggctgtattctgcatgagatgatgctctgggttgctggcaggggcagggcagatagcactggtctggatgggtagggcccttgctgaccagcctctctaggcaagcatggcactgcatctcccctggcctgatgaggatgaaacgcagggcctcagcaggcaggggccccatacccgcccgcccttctcactgggtgcattgagtgtgtgtgtggtggtggagtagtctcacctccagcttcccactgtgagctccctgcagacagggagagaacaggtacaccagctgttggccgctctgcctgtcccagccttgctgccacccatgatgccccagctctgtcccatcccagtcctccaaactctataagctgtgtcctggctgtgctgcctggcccatattttgctccagcccttgccccgtgtccacagtagacctcccaacccccgagccaccccagcagcagctgcatcttcacttcccacccttctcctgcttcccacaatccgcttgactcctccttgagagtgggatgatgtcacttcctgagggggcgtaggcacgaccccagtaggctagcccagccgctgctcaggcagccagctctgcttctgggcaccctcctgggagcatgcagtggctgctcctgggagataagcccagcagagcctgacctgacatgacatgctgcccagccacctggccccgtacccccttgtccaccgtcagggctatggtcactggtctaagaaagcttgcctggttcctttccctagtgagtccagtctccacatgcacacattctcctgggaactgtcctcagggagaggaggacctaccgcccacccctggaccaggtgccatataagcctctgttggccgtggcggggaagctagtgtaccccagccctctatggtaggagttcttctttgcacagggcagctgctggagcaagtactgtatctctgctcagaccagctttccacttactgaaaggttcaggcattatgctggcctgcccctgttacctggtggaacaggcagtaccctggtcagcccaaggttccatgggaactaagtctgcatgcaggtgcagaggacccctttaaaagataggcccctgcccatttacgctctctgtttcctctgttcccccgctctgctttgtctctactctgtctcccacctatgctctcgctctgtctctctatggcgaccggccatggcggtcagccattaccctgttcctcttctcttagtctccccattctgccgggccttataataaacttacagccttatgtctcatgtctcagcatttctcttttcttctttttaaacaaaagaataacacttacgccaccacttttttctcccagatccaaaggaggcccccagctcctgaccaccactcctgggcttgttggttgctgttttgtatccagctacttcagagaaataggcaccgggcagtgaaagctatcaggctaggagtgagtgtgtcagagcggctgctattctcacagtgaggggcagatgtccctagccacaatctggacccacgcttccgccacagcctcccttgctcagaaccatgacagtggctcagagttttgtcggatgggtgcaaaaccaagtcagaccacactcccggctcaatgggctccagcgaacaagaaaccaaagacctcactgtgcaaagacttactgagaactgctacatgctggcatcgtcacccttggtgttcatcagtcccagccaccaccactcacatactcctctcacaccctcctcaagcctttagcattcctcccactctacagggctctgtgctaagggacacttgttcttggttttggaagcctcggcccagatctttgagtactgggcaaatttccttgttgaaagacagcaagggccctgggtggctgagcatcccattgatcccacataggggaaaggagagaatgaatttagggtctttgtcttttgtttttttttttttttttttgagacggaggctagcctcaaagtcatgctccttctgttttgtcttccaagatctgagatttcaggctggccaaccagagcctaggccttcagaggagctgagcagttactatgggaatgaccttaggcagtagcaatctggtgggtgggcaggagtgacctcaggggtcactgctgagactggtgtcctattgctaaggcctttgttgttatgggacttgagagggcacgcacggggcagcttctacctgggtcagcatccctggtgcctggaggcccattagccatgggtaggggttggtgccaacacccaagatgcctgtgctgctgacacttggtagtagcccgggaagctccagggttctcttcttgctttcaggaggtgagcgccaggcccgctgaacctcccagagccgccagccatgcccgggatcgtggtgttccggcggcgctggtctgtgggcagcgatgacctcgtcctgccagccatcttcctcttcctcctgcacaccacctggtgagtcctagagccgaggccacagttctgggtttgaggagaaaggtctagaagggagttttctaactccctgttcctccatgccaggcccaaacctgactctgtcctgctcccaggcactcctctaggtattcccacaggagtcaggacccctcctggccagcaatcctcctgactgtggcagtgacacagtagttgccatcatctccccatgctgacaggagggcacctcagaggcacccaaagctaggtggacagttattttctggggagatatctgcctccctttcctcctatgagctgccctggttctgctagccatggacagcacaaggcacagaggcagcccacccttgctcagttgtactcttctacaggtttgtgatcctgtccgtggtgctctttggcctggtctataacccacacgaggcctgctccctaaacctggtggaccacggccgcggctacctgggcatccttctgagctgcatgattgccgagatggccatcatttggctgagcatgcgtgggggcatcctctacacagaaccccgggactccatgcagtacgtgctctacgtgcgcctgggtaagggaccgcttgccaggggctggggatgttctagagccccacacccttctcctgcacccattcacttcctcaggttttgcttgcttgctaacacaaactaagacccaccatggggagcatggggtgccttactagactgacattctagacacaagggcccagtccagcccagcagctgttttgtgaatcttcattggggaacacactgtgttgtttcttgtcctttggtaccataatggcagagctgagaaactgcttttgtaactagatggcttcagagtctaaaatgcttgtccttttggcccttcatagacaaatttagttgacccctgtttgaaaatgtgagcttgtctgcaaagtgcattgttgacccttctgaaacagatcagggtttaacccttctgagggtcaggttaagccagctcccctgaggaccagcctatatctcttttggaccatgtcctagcagcctctatgatattcctagagaacatgtctctcaaacttctccacagatcatggggaaaagaacaaaaacaaaaacaaacaaacaaaaaaccacattagtttgttttgtagaggaggacactgaagcccatgaagactaattagctctttcaaggtcacacggctaagtcatgatggaagagtcagagctgggatttgaacccatgcatctgtctagtccatagtctaggcccttagctactatttgttgctggccctgccaggctgtcatatttccttcccacttccactggggctctgggtttagaatactgagtgcatgggccaccatgggttggctcctgggactcctctctcgtccgtctaccctaccaaaacaagttcctaggtctgctgagaaacaacagttttcatgagttccagtcttcaatgtcctgtgatgaagttattggcattctcaaatatggatgagaagatggaagctcagagagattagtaacttgcctaaaatgagtctgattccagagctcatacatgaaattctgaaatccccaagaaactggggagtgctgctgccttgttcacctgtccagtcagagtctcagggaggcactagggacttgagagctcaatgcaagggacctagctagggctctgtgcacccctgttgtgagatggttagaggcctggcagcaggagccaggcttagggctcttgggtcctcccctggtggcagacagtgtggcctttagtcagaccctacctcttcttgcagccattttggtgatcgagttcatctacgctatcgtgggcatcgtctggctcacgcagtactacacctcctgcaatgacctcactgctaagaatgtcactctcggtatgcaccccacctgccccatcagctgaagccagccctagggtgcaacaggacccagcttgcaggggatggggcccaggcaccactgtagggagacacccaagcatggacgagtccttcaccctgtgttctgttatctcactcggggcccttgccagggtgagcagcagtggagacaggactgtccaggcagcattagggcttctcaacacctcctcaaaagcccactgagctgcctgccctgtgtcatgagtgggccttggagaccaaagactgctctttggtcttaggagcatctggggacactgagctacagtgtctctttgttcagagctcatgactccaggaaggtgaacccaacatcagttctttcctctcattgcaactgccaacaggaatggttgtctgcaattgggtggtgatcctcagtgtctgcatcactgtcctctgtgtctttgaccccacgggccgcaccttcgtcaagctgagagccaccaagaggaggcagcgaaatctgcggacttacaacctgcggtcagttgactgggtaggcgggtggtgccctggtggactttgcaaactggtgggcaggggagggtcctgtcccctcccaaatcacacgtcaacataatgtgagccaccgctctccgtgaaaacttcaccctctctctgcctcaattcctttgttgaaaaagtaaggctaagatggcagtacatgcctttcaccctagaactcagtactagggaggcagaggcattcagatcggttcaaggccatcctagtctacagtgagttcaaggccagccagaactacacaatgagctcctgcccccccccccaacacacacacactgaaaaaaaagtaagaaataacagttcttggctcaggatgtcattgtgagattttttttttttttttttttttgagacagggtttccctctggctttggaggctgtcctggaactagctcttgtagaccaggctggtctcgaactcacagagatccacctgcctctgcctcctgagtgctgagattaaaggcatgtgccaccaccgcccggctgtcattgtgagatttaagtgagataatatacgccaagtggttaacactatgggctgagttaatgggaagctactgtcagggatcagtcttttatggtaacagcaggagacacaagcattgtttagagcattatgtcttccctataacgggtggagaaaccaaaggaccaagattgcctggttatgtggtaaggctgagaactagctctcagcctgacttcggagtccttacttgacaatcaggtgatgctccctctaggtcccagaagttgtaagaagttaatcacagaaggcttccgggaggagattttacctggtgcttaaaagaaatggtatggcagagaaaatgagagagggtgtccagcacgttcatagtgacttctttagtgaaagcaagcgaagttcccaggatgagtcagtcacagtacagtagccccataatcaagcttctcctgtaaggccagccccacacttagccctttatgattaatccagctagttcttttgctattccagagcagctgtgagaccccttctacagatgaaggatctgagtcactgccccaagccacaggagagcaggctgccaagacccctgcccagtgggtctgtcccccacccccactaatgcctcagaccttccacgtcagcccatcaacttgtcactgcctccagcaccacacccatgcctggtctggccacctcccagcctaaaatgtcaggccttggagccagggctcaagagcccatttttccctcccagtgcagctggccacctcctcctgtcccactttgccggctctgagcacatgccgaatcagacctgtttctggagaaaactcccttcccttcctgactctgagcctttggggctccaggcagtaggagcctgtagggcagggcctggtgcttgctgtcattttaattaggaagctccctgtggtttccaggccctgtcagaggccttagctcgaaggcccatgacctgctgtggtttctacaggtctgcgaagctgggagcacagcctggctgcaggctttgtcaagctgaccccctgcctgagtgtcctccactggctctaaaactaacagtttttctaacagggacatttttcaagctatcaactcccaagggcagggatgtgcacaccccatctgccacatggctaagttattttggtttctgaaagctgggagtgtgtctaagtttttggttctttctctttccagtgaaatctggtgaggactggggagggtgttattcccggctgtttcccaggaggcttggcctcggtttttgtagaaggaatgtctgcccccttttcacatagtgaatctcccaacagagggctgttggggggtccatgaactttctgtccagacttggtatgtggtctccctggtgtggttggtagactgactgcacttgaccaaacctgtcagtttctcacacattcctattatcatctgccccctggcgttgatgagaggtacttcagtggagtgagcacttctatctggccagaggctggggaggggatttcacatcctgtatttgaaagcccagttggatcagaaagcaaaaagtatgtgatgccctaagaacccagcatggccagcttcactctgtctttgtcaaggggagtgggttattggtttgggatacaaggctgcttcgtcttctagggactgcaggtcccccagacagctggtccgttacatcatccctagcccctcctgctgccttccttttggtcagctgcctatgtagtcagggttaaaggaatggggagccattcttgtctgcagagaggagccaagaagctcattgagagccagtctgtcactcctggtgaccataaagtgccttgaatgcatctgagcgccaccttgctcccctctccagaccatcctgtggcaggcttttaaggggggcagcacactgctcaaacccagtcagcgtttgctgacttagtttagagagtttggagatctacacggttgatgccaggactgttatctctgtgcttaagccacactgatttcctgggtacccagcacagtagtgcctttgtgggaaagtggcctgttgttctgcctctgctccctggctcctgagcccccagtctccccacctgagctgaagagggagaagagaatgggcggggcaactgtgcaggcagtgtgtgtgccccacccagacagcagctgtgaggaactgggaaacactgaggcctcatccaactccccagatttcctctaagtgctcaaccagtttctgaagtcctttgctaggaagggcagaggacagcaaggccacactggctaacatctctactgcttttcatttaagcctttagatgcctggctgcagaggagcccctactttggattcccagctctgaagcccccaggtcatgcctatgggccagtctactaaaagtcagggactaaccatcccacaacaactcaccaggctggccagcaagagtcttcagggaataccctggctagctggccacccagctgtaactagcctgctgcctaccctccctcccacgccaaggtccgctggggagctctttggtgtgtcctgggaacagaccatcctcttttcataacatcctctggtccttgacttcacatgtcaactgtctaccttcacaggcaccggttagaggagggtcaggccaccagctggtcccgtcgtcttaaagtgttcctctgttgcacccggacaaaggattcccagtcagtaagtaccccgggttgtttgtgtcactcagatcctctccctgccacgcaggtgcctttcactcctctggtaatgttaggtgggtggggccggtaggaggtggggctgtgattgtgagcacagtgacagcttgccctttcactgatagactgccccaccctgtaaagcagccattcacctgttttattgaggaaacagaaaatcgtgacgactgacttgatacccttagcgcacagtttagtttaggagcagaaaagtaacacatggctagcagtgtggatagagctggaaggcctggggtgctgctgttgagtgcttagtctcgggctggtggcatacagtcagccttcatctttgaagctctgaggagcaagctcagcagaagggaggcaccaccagctaagggtgattctgagttgggggacacgtcccctcagtgtagggtacggaggttcgaggtcatccagccccaccccccattttgtagatcaggcagctgagacccaaagtgatggaatgatttgctcagtatcacacagctagttagtagtggagctagagaagtcaggagaccactcctccctggagcaggcagcaaagtgcccgcctcacatgcccccaggaagcctggagtggaccctcctaaacagcacccccagggaccttagagtgagtaacctagtggaagaaagccccagtgttccctggcaggaggtgagtacttctcggggcgtccagggctgcctgtgagatccctggatcgtggctgcaggtgtgtggtgcagagggccaaggggagccccggcaggaggaaacgaggcttgcctgggtctgtgaagggcacagtcttctcctgtgcacaccgcagagtcagggcccttgtgagaagctggtgtaaaggtcacatgtgcccagagcatgatcctgttagacacagacagcccaggggcagatcccatcagagcgattttcatcagcctgtatgttgttgctaaagagctagacttaaatgtcagtctttaaaaacaaaacaaaacaaaaaaaccagtagtgtttacataaatgcctgtatgtccaaatctggcaccttgggctgggcagctgaggccgaatattgtattgggttctgtgtggccccttagaggtttgatcttgccaccattggctcactcaagggtgagacccaatgagacagagtcagttgccatgagtttgtttcccctccaccctctcctgacaggttcaaggcagcaaaaggcaggggagacccaggacctacaacctggcagggcttgcctctgtcctttgcctcctactcaaggctcagggccagctcgaagccagagaggccaccgactataaaattgtacttcttctcaagcacattacaggcccactgagctgaacccctgaggagcagggggagcttgagacctgggagccgtacagagctcttagctgaacttccagggccacagctggtggggtagggacagccaggtgctttgtgtggcttctgtgctagagaagggctgcctggaccttgattctagatatctagagaaagagaagaggtaagggctcaggttgacacttgtaagcaaagggtggcatgaactgtaggaccttagtggagagaagaggtctgggaggaggaggaagcgtcagcagctaagatgtaaaggccctgaacccagaacagggtccccgggttcctgctggacacagccattgcctgagggccaagctgaccagaattatggaggctcctgatgaacctgccccggggattcactcatgctctctctctcctttctcctgctgccttgccaccgcctcctgccttcccgggccttgcttgacaggatgcctactcagaaattgcctacctctttgctgaatttttccgtgacctcgacatcgtgccctccgacatcattgctggcctggtgctgcttagacagcggcagcgagccaagcgcaatgcggtgctggatgaggtgagcacccctagctctcctgtggcccctgctgaggatcctgtggcatcctctccctcatgggtccccaggccactgtttactgcacattgtcctctactactgtcctagctgaaaccttcagccagccattccactaactcctgataggatggcttgttctctggaccacatgtggttgcttctgagaccagcctccagggacatcctgatcactagggttggatgatcaatgccagctcaagtgcttctgtcttctgtctgaagtttgccctgccctcctgtcctctccagcacaccagttctggtctctatacatctcccacaaaatccctttccctctggggtggatcatctcctggaggtcaaaggtctgggtagaatgggagaaactagaaatacagggaagtatgattttggaaaactgatgaacactggaagaactgcaagcctcatgctccttcagacctctgaagcaggctgaaactgaactcccttctcatctttgcatatggaccactgtccatcttaccatgcctgttttccaggcaaacaatgacatcttggctttcctgtctgggatgccagtgaccagaaacaccaagtacctcgacctcaagaactcggtgagtcagaaatctcttcctcccccctgtgcttctctagaccacttccctacaactacatggtgtgagctgaccctaccactcttgctcaactgtccaaggagtctctctcagatcagatccataagagccctcacatcgtgatgtttctataagcagaaccctgaatctcctagccaagctccaaaacgtttgtttgaccctggctgctgccctcatgataggcagtggggtgtggcattgccgttataaagcctttttagcagtagaaactttcctcaaacacctttagtagaaagctcatgtgttacagggaaagtgggtcccatggtataaaggcccagcacaggccaacatggcctagggtggaaccacagctggtagcaggagcagtcagcctggcccagggaaagcaaactgatttaggttcatccctgctccatggcttctctctgcaatatggagcaagtccctcctccttaaagccttagatgtaaaatgccctaggcgtaccttgcacccagagctggagtaggaggaagtgacccatcctaaatccagtccagcaaggtgctagatacccagtgccaatcactgagtctggagaagtttcggcccttggggaatctgtctttagaaaagccccaggcatcttgtctccccaatgcagacatcatttcaccagccacatacatatacagccggtgcccctagccagatgcctgccactcactagggccttgcctggctggctcttaccctctgtcctggggggaggtgctgaggctgccggtgccccgccctccccgtgctgtcacccagggtaattgcctctgcagctactggctccttcctgagttctgaagagcaggcagagggtgctgattgaggcctacctgtttcacttcacaagatgactaatcaccctccttaacttttacaaggtgactaattccctctaagtgccacagtcctggtgcccaggggctggggactgaccgacaggctttcctgggacactgccatcctgcttctggacagcttatagcactgataccaaccacagcatcaagagcagttgttgggcagcagactcctgggtttcaaagcggcgcctttctctaacatgatcccaatctcagggagacagcctccccccgcctcaggaacctgggactccatgagtcaaactagagagccagagacatttggtgacatgtttccatgcccagcatggctcatcttactgcccacagcgagacacccccagccacaggtcccagggcttcgcagggttcagttccccggggcctgattgcagaggcagggagactgactgccactcaatcccacactcccttccttcttgggcaaacaagccagtcctcccgagtgatttttctgtccccaaatcatgaattctaagactgtagtgataggataggtctcatctttattctggcctgggttcggggagataattgggcaaatgtgatcagtgtttgaaggggctgcccctcctccaccctggggcccagcagctgtcccccccactggagcaggtaggcaggctcccacttcaggaacaggtggtggctgaggtagcaggcaggagaggcagaagttaccaccctctgcgtcctgtcccccagcacgagatgctgcgctacaaagaagtctgctactacatgctcttcgccctggctgcctacggctggcccatgtacctgatgcggaagcccacctgtggcctctgccagctggctcggtcctgctcgtgagtactctatctgtcagtccccagccacatcagcacagggcggggggaagggatacaatgatgtgctggtaccctcttccctagggcttcaaaactactatcctgccccctcctcctctggccccaccaaagcagcttctcttccatatggtctctgggccactccctttctcctgcctccttcctggactagaatcacacagttctgcgtttgaatgcagactttgggtttgtagcctcgggcaagtcagtgcacttctgggggcctatttctgcatccgtgaggtgggatgttgacgcatccatttttgagatgcgatactgctgctccgcctcccttctctgggccttcctctgccccctacagccactcccttctgaacacatctcccttctcttggctctcccgtgctctgcctttctagaagaaagaactttcttgggaaaggtctactccatggaggtctctagaaactcactaagaaggcatttttgagaggctttaccaggctctgagcagagaaagacctggacctaaatatgacctgtaactggctccgccctcagccccacccaggggcaggtctctgtgcttcttctaagtgggccagagaagggctttggaaagaccctgtccttctgtggtgtctccaccctcagtccatgacaggcagaagcaggacagttccctgggctcccgttccagaaaagctgacctgataggacagtacctctgtcctccatggcctgtccagggggacagacgacagcatccacatctgctctgcagtgcctctaccttcagaaagctggtggctcttgggaccttgttcctcaccacccccagcagctggtcagagaggaccagatcactacatgctccgcccatctctgccatatgtacatggctgtcatttccccctgcactcctgggacacagcttggagagagagattctcaagatgagcactgggccaggagccccaaggccacccacccagcaggtggacctccttcatttctcgggctcctgtgaccctggttctagcaggtgctatcagccattaggacagttcagaattgtggagccacaggcaatggggctctgagttctctggaaacagtgggaatataagcacctgtatgagccagtgctgaaatggcagaggacagagtcctcagcctcggtgaggcacaatcgggccccctgttggaagaattggcttagggtaaggtggcgaggaaggaccaaagctgggggataactggagagagagatggctgggcaccgctcttagcgtctgctgctgcctgctgctgtcatttccactgactctcagatcctgcactgaggttgtctgccccagcaggtgagacatcaccactttgccagggcctattgtgtgtggagggtggatctggacaaggggcgtgacacaaggggcaggctggggtctagtagctttgggaagtggcaggcagtgatggctctgacaggaaggaagttgaggctcagctggaccatggctacagaatcaggaagtgacattaccaggaaggatttgaacccaagttctgactctcctctacctcattagagcctcctgctcagctgaggaaagaggggagcttcctgaaggcttgaaggtaggagctcagaccctaccatgtgggccaagcctgccaccacttggcctggtggtatggtggcttctccaggctcagttctggcaagtgtatcctgtttattgtatcctgtgtatggggcagccccacttccaagcgcaggcatttccgggtctcagcttgatgctgagatttctcgatgggccctctccctcttgggaagtcacagtcccacaggcgctgctctgagaagacaaacacctcacactgaatgtcaattcaagacagctgctggcagccctgtcacatttgctcccagctcctggcacccaatctgttgggttctggctccctctggtggcctgagaaacagatgcatttctccccgacccgtcccccacccctatccctagctaagtgaccagttcagccctgtaagcttactcctgtaagctcagtaggcttggtgctaagggaaacgtctgtgactagcaaagagcagaccctttcccgtgtagctcctgccaggacagtacacagatgagggactcaacggcaggtcagagcacatgggtgctttggacgggactgagtgctggaccaggcgtcatgtcaggactggccctgttagagaggtagctgtggctgacctcgatgtagggtcacatttggatggagactaaaggatataggtggatggggtgcacagaatctggtgagggggccaaggcagaggaaggaaaggcaagagtgggtatagctgagaggggagtccgggagcccggcagataaagccagatggggcagagcctggaaaggactcagccctttgtgctgaaagggaggacgtccctatgggatcctaagaggaaatgtgatagtggctccatgtgtcttcagagggtcctgtgctaccgagttggtagtgcaggggcaagggtgtccaagggagaggcggtcagtctcatggaaaaggacagtaggtgggtttggttttaaatgcgaagataatgtaggctggtgtggagtggctgaggggactggtatgatagtcaggagtaggctgaccgtacagctaaggggggatgctgtgtccaataaggtgcctttgggggtctgctggggtccagagtggactcatggcaagcacatgaagtagggaggtccaggctagagccaggaccttggaaatggagggcaaactggagaggaagctcaatctgggaagaaagaagagggatgaggtctccagccaagcggggaaggacccatgagtcaggtgcttgctgcctggagaccatgtgatggactggttcaggctttgggcccttaggggtcactggggcttagcaagggtgagtcaggaggcctggagccacttccagagaggagggaaggagaaagctaccccactggtgctgaccagccctgagctgtctgccaccccaccccaggtgctgcctttgccctgcacgaccccgatttgcccctggtgtcaccatcgaggaagacaactgttgtggctgcaatgcaattgccatccgccgtcacttcctggacgagaacatgactgccgtagacattgtctacacctcctgtcacgatgcggtgaggggccaggctggggacaggaagagctggggcccgagttttctgaaggcccctggggacccaggccaccaaagcaattcctcaggccagtggagccagctgtagtttccagccagctgtatgtagtccagagatggcctcagccattttggtgacccagacccacactgactcaagctaggtggagaaatagatgccagtcccattcactgttagggcctccaggttcacccttaaagaaatggaagaaacaggagattctggggagaggcagtgaactggtatgatagtcaggagtgagcataggggctgcctgagacagagtggagtgggagggccagagacaaagactcctcagaaacctccaggaaccctggatttggaaggtgttagggactctgtggtgattggagtttcattgacatttccctaagtctggcctcattctggggtcacttaggctcatgagctggtactcctaggtctatgaaacacccttctatgtagctgtggatcatgacaagaagaaagtggttatcagtattcggggaaccctgtcccccaaggtaagctagctacccatggctgccccacaggcccaagtacttgtggcccttgtctgtcctcctcagccacccttatgtgtctttcttctttctccaaggatgccctgaccgacctgactggagatgctgagcgcctccctgtggagggacaccgaggcacctggttgggccacaaggtatcagcctcaacaccctgaggtccccttacctttgcccacaaccccagacagcactcaggtgcctgcagttacagggatcttctctcccagagatcagtcagaaggctgtggtcttgtctgcctgcccagcctgaggcctgggggctcgggagcctggggattcaggggctgtcctagaagttccaggacaggcagctggggagatattgtacctgtttctgtcaggcaaacctccctctggacttccattttctcacttggaaaaagcaattcaaaatgaaaccaaagaagtacccacaggcccccacagcctgtgttttgagggctggacaggggcgctggctgagatcactagttgtctggtccctgaggctgcccaccagccctgctctgtttctctcacccagggcatggtgctctcggctgagtacatcaagaagaaactggagcaggagatggtcctgtcccaggcctttgggcgagacctggtgaggagttttccctgccatcccaaacactagctcctgtccctccctccctcattcccaactccttctagctggctccaccctgccccaccctacctcccaggccccctcttctcaaagtgtcctttctcaggacagtcctaactgccctgttggtaactgcagttaccaacagcctcagagtcaggaccacttgtaggaaattttgcagaacccactaacaaaaacagccaccaagcagggagaaggctgcaactcagctgggtggcagcctcagtcagcccatccactactccctgtatgggtagctcctcaggatgctgccagcacccattcactcccaggcctcacagactctaggctagtggtcagggtggagggatgaggtaatcaaagggttataactaatcaccagagcagtcaaagggaaagtgcaatgcctaggagggaggtagctgtttctggaaaatcagggagggcttcctcaaggaggcaattctgagcaaggctttagaggatgagtaggagtgccttcgagaaaacagactcactaagcctttgccctatgaggagctagcttagctctccctcagccctaacatccatccatgcaggacagcatgaccccggactttgagaagagccctcatcctctcagcgtcagctgggaaactgaggcaaggctctcaggcatctcttggttcccagggccgtggaaccaaacactatggcctgattgtggtaggccactccctgggcgctggcacagctgccatcctctccttcctcctgcgtcctcagtacccgaccctcaagtgctttgcctactccccgccaggaggcctgctgaggtaagaagcttgaggccttagagctaactggagcaactaggacacttgaaagctaagggctgacttgagctaactgggactgggagccagtggctggatgggcagctcacctggagatttgggaatgacacataacagtgcttgggtggtaggatgaggactttgtaacatgccaagtggatgcccctcccccccaaagatctgtggtaaaacacaggcaggaagggcagaaattgaaacccagcctggcactataagctccatggaaagtctcgaccccaggtacagaatggggccgcccctggcaaggccctgctctgggcctgagcccctttccttaacttctcctacagtgaggatgcaatggagtattccaaagagtttgttactgctgtggttctgggcaaagaccttgttcccaggtaagtccctgtctcttgctgtgggcctcaccccactccccatcactcacatctcattcagctcccctcacccttccctaaggactctagtgtcccttcccactcttggtggccttgtggtgggatggacagagacagtgtaggtaccataccttcctgagtggcctctctgacctggcttgcctccacatcatgacccagatggacttgtcttcttattcctgggggccaggtgcccccactgccccctctccagcccttgattgggtcaggctgatggctcatccctttccacaggattggcctttctcagctggaaggtttccgccggcagcttctggatgtcctgcagcgaagcaccaagcccaaagtgagcccccacctggctatccctcctgttgttccccactgatccccaggacaaagcacaagaggtcacagctgtgttatggacactcagcatccaagctcagcccatccagtccttgtcattgtgaggaaactgaggtccagtgtggaagggactttgctcacacagtaaagctgtcatggtgtcagaactggaactaaggggctcctcctgcacagagctgccctacatgagaaaggcgatccctgagggcaggctcaaggaaggctgctgtcccatatggagggtttatgcccagcttccactattctgtggagctaggagagagccagcttattctaacacataccaggtcatggaagatcctggaggccctttctatgcaaagagaccttcactcccaggtggtggggtggggcatgctgttgtggccagacatcctaggccaaaaataggaggtcctctttgatcagagggtgctctgtgagatagctgccccctcccaggtgggccctcaccctctttctgctgcctatctgcagccttcctagccttggtgcctatgaccctctggcagtcaggaccctgggtcaggtgtcaggcaatgggtcagcatagctttatgaaactgtctccctgaaggaaacagcgtctgctcctcacagagccaggcccaggcattcatcagatccgggacctgtcacactgaggcctgtcccacctctgccttgcacagtgacccagaacagatccctcccctcaccaagtgtgtctcctactcgctagatgaggtcttggctagtcttccaggcccttgccagccctgaaatgcaacaattctgtgtcatctgtccttggcatcttattggccacctggtcaccgtacacctcagccgctgcctcttcaggcaggcacagacctttaatgctctggccactgcctccatcaccagttctctcttctcatctgttgagcccctcctttgtaagcacccctgatcctacccacctagccagagctactcagctctatacccctctctctggccctatgtagtggcggatcattgtgggggccaccaagtgtattcccaagtcggagctgcctgaggaccaggtggaggtgaccaccctggccagcacacggctctggacgcaccccagtgatttgaccatcgccctttcggctagcaccccactctacccacctggccgaatcatccacgtggtccataaccatcctgcagaacagtgctggtaggtgctgatggagagctgggccgcgcctgtaggtgtgggtccaggacaggggatgctgagggctgggccagcctctgatcagttaaccactcacaactggggcagaaatggaaacaacagtccagaacccctatagcagggttcccccagctgctagccatggaaagggaacctagcccatgtttgtccccaacaggactttatgattctgtgtttctatgaaggagcctaatccttggaagcagtgtcctcccctcacagggccagggtcaggcccaggcattcatcagatccagaagcaggtgccagggacctgaccctggtggctgtccagctgagtcaacctgaggcctgtcccacctctgacttgcaccccactgtcagcccttcactggtgtgcccccaaggcagctcttcctattcttgattcatttaggaatagatgacctatagcagccacctggctctgggccagctcatacctcagtgcccctgcgttaattgacagatacatgtgggcaagaatgtggccaaggcaagcacaagaacagggtgctagtaggtagactctcagaaccttgggccctggaccctctttcttaacacagtctgcccctcttgacagaaagctggggagctgagccctgtccaggggtagcagatgtagcctaaacagaaagcagatgggaagccttgcaaggactgcaactgaggctccagaccagcctttcacaggctacaggcaaagcagccaggcctgggagggaacactgacctgctgcctagggtagacaggggcatccaaatccagcctagatccctaatcaagtgcacagagcagagccccagacccctttcttccctacctgtgtccctctcagctgctgtgagcaggaggagcccacatacttcgccatctggggcgacaacaaagcctttaacgaggtgatcatctcaccagccatgctccatgagcatctgccgtatgtggtcatggaggggctcaacaaggtgagtgcaggcggggctcatgggtgccctacagattgagtccctgtattcctcctgaagctcggcagcccagccacagtccccagctgggccctggtagtcagaaagacctgcaatctttccactccatactcctggctatttccacacatcacattgctgcatggtagggaagagggaatttagaagattcctagggccctattccttggaaaagtcgaactgagagccctggaggccagttggccattaccagatatgtagccaagtggcaacagaaccttccttcatgggccaccaagggactagaaagaagagtactccaacgtggctacttgagggacaagcatcccatggcaagtcccaggccttccacaaagaaaggggacccactgagccatcaggctatttgctctggaaagccacagggctgggctggccacccctctaccacaagccccaccccacccccatcctgtcctcaggtgctggagaattacaacaagggaaagacagcactgctttctgctgcaaaggtcatggtgagccccactgaggtagatctcactcctgagctcatcttccagcagcagccgctgcccacgggaccacctctgcccaccggcctggccctggagctgcctgccacagaccatcgcaacagcagcgtcaggtgagtctggcatccccactccaccccaagggagtgtgattacagagcgcatagttgtgctcctgtacatccacgcattctgtgtgcctgttgggcccatgcatatccccggagctgtgtccatatgctcagcgtgggagttaaactctgctcaggttcttgctcaccctgctttggctgtctctcaccttgtcatcagtgtctggggccagggaggggggtatttccagggagtctgggaggtttcaaggcacacacaaacctacatacaccagacctaaacactgatttgcccattcccccttagatccaaactgatacgcttctgtgtacttacacagctgtgcatatttcttggggcttatgacaaggtgttttcacaagtacacagaatgccccacacaggtcacacgcacaccaaggcaggcagagcgtacatggctgtgggcacacttggatagggagacatgtaaacgtaatggctgtcccgtgccagagccacagcaaacagctacaagtggtccagctgcacgtaggcaccaaggcatgcacatggagtcacggatgtgcacacgcttcatggtgggctctggagcactgcctcttccagaggaaggttgtcctgcctttctgagaccctgactcccagaccctgctttcttccttataaagctggctactgcgaagtaggatgtcactgagtcttggtctttgctaaggaacccccccccacacgccctgaaacacccttccctgtgtgtttcctgtggtggcgacatgtctccatgaagaacccagtgtctgtccttggccagtgtacctgaggcaatcacccatttcccaactcctcctcccttcccaacagcaaagtggctgcagagtttgctgcgcctgtccagcatagggctgtatcctggagaaacccgggatgaggaagggatagaagaggcactgggaagtgctggcctgaaagttgggggctagaatccctcttccctccctccctgatctctttccttccctgtctctccgtctttccctctatgtctcccatttactgtgtcctcatgagtgagccagagcagccaatctcttgatgccgtaataggctagtaccataatgagtatgaatgcataggactcagactcctctgggaatcttagtgctcttggtggggtcttaggccctttggggacctaagttagtcctgtccacctagttagtgtcagccttttgttttctatcttagcttcttatgagttgggtttattctcttttagatttatttttattattttctatgagtatgcatctatgacagcatctgtacacatatgtgtaggtgctcttggcggccagaagagggcattgagtcccctggaactagagttacttggggttgtgagccacctaatatgggatgggtagtaggatctgaacctatgtccccatgactgggccatatctccagcccgatgagttggcttttattttttatttttaattaattgtttatatgtatgggcgtttttcctgcaggtatgcctgtgtaccatatgcatgcctagtgcccttggaggtcagaagagggtgttgaatctcctggaactggagttacaggtggctatgagctaccatgtgggtgctgggaaacgaacccaagtcctatagaagaacagccagtcctttttttttttttagatttgtttatttatttattatgtatatagtattctgcctgcatacatgcctgcaggccagaagagggcaccgtatctcattatagatggttgtgagccaccatgtggttgctggaaattgaactcaggacctctggaagaacagccagtgcttttaatttctgagtcatctctccagccccagccagtgctttttttacagcactgagccatctcttcagattctatgagttggttttcaaaagtcaggattctctgccccaaactattcaacaaggactgaactaattctgtccttgtccccgcttccttctagcctgggaagtaggggtcagtctcctctgtccttctgagtcttatccttatgctcttcctctgcaggagcaagtcccagtctgaaatgagcctggagggcttctcagaggggcggctgctgtccccagtggctgctgcatcagcagcccgccaagaccctgtcgagctgttgctgctgtccacccaggagcggctggcagcagagctgcagtcccggagggcaccactggccaccatggagagcctctcagacactgaatcactgtacagcttcgactcacgccgctcctcaggcttccgcagcatccgaggctcgcctagcctccacgcagtactggagcgtgacgagggccacctcttttacatcgacccggccattccagaggagaacccatccctcagctcacgcacagagcttctggcagccgacagcctgtccaagcactcgcaggatacccaacccctggaggcagctttgggcagcggaggtgtcactcctgagcgaccaccaagtgccaccaatgaggaagaggaagcagcgggtggcgagggtggtggggtggccccccgaggagagctggcactgcacaatgggcgcctgggggattcgcccagccctcaggtgctagaatttgccgagttcattgacagcctcttcaacctggacagcaagagcagctccttccaggacctctactgcatggtggtgcccgagagccccactagtgactatgctgagggccccaagtcccccagccaacaggaaatcttgcttcgggcccaatttgagcccaatctggtacccaagcccccacggatctttgcaggatctgctgacccctcctctggcatctcactctcaccctctttcccactcagctcctcaggggagctcatggacctgacacccacaggcctcagcagccaggagtgtctggccacagacaagatccggacttccacccccacaggccacggggccagtcctaccaagcaagatgacttggtcatctcagcacgctagcacctggcagtggctgccagcacctcccctatcagaactcaaggccttgtgggtacctaatggccacttggggcccagtagctttgaggagaggctcccaggggccaagtggcctcaggccctggagcactgctgctgagcagggggtccgcatccctacctcagcctaggaccctcagaaccaagatgtctgggaaaagcaggggtgggtttggtacagggaggagacttcaggttggatggccagtcctcagccctcagcctgactcctctgtgtgggcagcctggtatctctgttctgggaatggcactaggcaagctagcttcctgtcactgccctccagctactctcccagagccgaggcagaaagcagccccctctccacatactctcctatgtcgttcaagttggcacctgccctggccactatcccccagatctggtgcctgctggccagccccctggggtgatccccgccaaggtggcccgcagtgctgtgtatgtttacagaaatctgctgggcttggctcaggttgtatcctgggcttgcaagcccccacccccaatcatgtgttaagttgtcccctgtgagtgggacctgaggaccagaggggactggaggaaagtagggtcagggccaccctttctctgcctggtgccccttatcttcatggattctggctgctgggcctgcctgcctacctgccactcactccctggcttcctggctcaccttctgccccccaggactctggccattcaaagggtggtgggcactcctgtgacatcacccctggctgcagagtcagggccctgggaagaaaaaaaaggcatccaaagccccgtatcttgggcatcctgcctgcctgacccctttatgttaccccaccatgcctaggcagctctgggccctggggtctgaaaccaaacatgcctctgcccacttgctctcctggctacttagctcctttctgggtctgggctccacctcccactgtgtcctgcccataagaagaggagccaagagcagggtatcatgagtcctggctggaaacccctgtctactgccaaggggaggggccagggactcaggctgtcccaggttagcctgaggccttcataggttttcctgtggtttggagaagcagtccaggaagtaggaacctagcctttccccaagctggggtggggaggttgtgcatgctagtgtcgggtgtgtgcgtgcatgcgcgtgaatgtgcaccactcctaaggaaaggggctgcagagggctgcccgccttccctgccttgcctgcctcctgatgctcctaacctgccaagaatctagcctgtgaagcaaagccttgggacaagccagttacttgggtgtgcaggcaagccactgcccacttgtgcccttgtctcctgggaagcaaggtccctaccactccagccccactcacagcctctctaggctcccctgaccacctcgtgatcactggtatctgggcctgagccccaattctaatccccacagctgggtggccaaggatggctatccaccctaacagatagaggacagagacctgggagctgggcctccctttactctgagactccccacctcaccagactttttgctccctgccccctgccaaggcagtgcctccacctagcacagaagtaagataaaaatcagtggttcttagaattcacgtgttagacaaaaatcttaaatcagagaaacaatgcaacaagcaccccagccagcagcagagttgtggatctggccttttaactcttcctctgccagggtaggtgtggggggctcctctagggtgtgcccctatgcccaggactgagccatcagggacataccccccgcccccaaggctgcagccatactgtgttacaggcttggggctggggcaggcttggactcagccctagacacccagggccagcccacccctcccctgtcccctccctgcctgaccccagaaaggtgggcctgctgcacattcccatcaccccatgccacatctgggggggggtctgagccacccccttcatcccagttcggattgacccccacccacactgtcccccggacctgcagcacaagctctcccagccaggcgctggcctgtcctcccagggatctgggggacgtccatatgcaaacagtagcaagcagccaggcccccataaaccctctgcaccccacgtgccattctcccatgacttttttgtacttaatgtatgaaagatccacactaatattgctgtaaaaaggagagacaaatcaatatagcttattctataaatatatctgtatataaagttttctgtatattgtatagagctgtgtataaactggacgtagaagcacacctctgccttgtgtggtcatcttttcatgggggggggcaacggggccagcatgggcaggagaaggggatgagggcctctgagaccattccccagatgagccagaaagcatgaggggaaaacttgaggagccatgggatcaagccttttgtcccccccccccaaagagagaaggcaggtagggctgcctaagaacagcccagtgggatagaactgtgtgactcaaagttggtacagttccccgtggttttgttcaaatgtaagtgctaagccagcaagaatcatggggtaggtgagaagtgactcccacgaaactgtcctttgacttccacaggcatgcactgtgacatatgtacacccgcccaccccaaaataaatgcataaacataatgcaagtttaaaataaaacagatgtggttcaccgggttagggagaaccctatagttttcactggcctcctgccgtgtcagtgcccagacccaggacagctctgagtcccaccaagcaggcagaagtcctcttgaatcccaagtgcatgagagcagccgcttgttgagtcctatgtaagatatactggggaagggtttgggtctcccacgtagtacccttgaagcatgccgttattccgtcccagagggcactgagactcaagagtaggtaacctgcccagatgtagaaccagcaactggaataccaggcccacccaccctctgcctcccaccccatgctgtgagctctggcaggaatgggaaacctagagaggtagcattgacgtgttgaagccactagaaacttcactgagggaccctctggaggacccagcccagcctcgatccaggcagtgccgagcatcctgccagcctcaggccctgaaacttctacacagcagggggcgctgtttctccaactagactaactggcctgcagagcctggtgtagacaccctggcccagccaagtcttgactccacctccttcccactcagactgcccccacaagtccagtaagaccccacttgatggggagctagtgctagtggccttgaaggctgccttcccctgacaacccctgaacagcagaggaaacctgctgtgggtcacacaagaggtacagacagacgtaggacctgcagaggtttgtcctagcctaggaccctcaccttgtagaggtttccctctcactagtctgcaaatggtcctggctctaatggagcaaaagcacagcagatggccagagaggtactgtggcttgctcagggtcatatagcagatggcaaccatctccacagacgacaaagtctgatacaaaagtcctcccaggctactttaccaggcccagctccttaaccatgtggtggacccatctgtgcttgaaccccaacttcatcatggtgtctaagtctcctacttcatcccagcccagacatgagaggccccggtgtggctgctcttttgctctgtggccctagtggaataaggaggtggcagagccagctcccgtgagattaaaaggggcgtgcaccctgactggactaacctcaggactaccctggatttgaaagatattgtttttatagtatggtgaatctacccatcctcagcccttgacgacctgacaagctcagtcctgaagtcaccagcccgccctgagacagtagacatttaggcttgggatgtatgtgtggagtacgcaggaaagatctttgggtagttggagtctcaaagggatgttatttctctagtggtcccaggcaactcaggaaataaatccatctttcaaagttgcatggcatgactgggtgttcacttggtctgcaggcaggcctgaccctggttggaggaggggctggagtgcagaaaaacaattgtcttaggggagtctgcagaggggacaaacctctgggtgcatgagctggaaaagaatgggccgctcagtgtggccccctcccccctcggtgggggccacggctgggaagggggagccgtggtcagtgcccacagctgggcctccagcaaaatcccactctatatacctaagagaggccgctctgagaaccgcccccagagggacaaaacctcattgtgaagcacccgccagcctgggcaccccctcccccacgccctcctcggagggccaccacaagcctgctgactgggccacatctggagctcaggctctggctgcccttcccccatgctggccactgagaaagagggaggcaggatgggtgacagaagagctcacggggtctcactacctgcaaatctgggctagttccccactttagtctgacatccactgccaggaagagtcaaagttctaagagttctaagctggctgggttagtatcttgattagataacaagttcccccactcttctgggctgttattggtgttgtgtgtgtgtgtgtgtgtgtgtgtgtgtgtgtgtgtgtgtgtgttgtgagacagggtctcactttgtagaccccactgactttatacttgcaatccccctgcctcagcatccccagtgctttgattacagatatgtacccccgcatgctgcagggaccactcaatttcttctttctccaacaggagatacagcggggtaggtctttctggttctgacttgctgtgcctaaggctcttgtgaggctatgcactgagtcactctgtagtgggatgatttgatggctctgggattccagaattctctgcctctaagcccagggttccgaagtttagattcctttgttcactcgttcaactcacttcctgcacccactctgtgccgggggggggcaggtgggttttgttggtatgtttgttctttggtgtggaagttacagcagtgacctccgaaggctttccacgagatggagaataacgggaacaaagttagaagctgcatccatatggaggtgaggaaggctgaggtggagagagctgctctggaaagagtactgatgtgtgctctgaggcctggtacatgaaaagaactagccttttgggaacaagcatcatagatgaactagcatgtgtcatggccctggggcagaggtgggcctggcatgttaggtgatggcaagaggtcttggtagagagagaatccaaagtctgagaaacaagagtaagaggtttacatattggtgtgagtgaggggaaccaatgttttttttttttaatgatttatttatcttatgtgcattggtgttttgcttacatgtatgtctatgggaaggcaaaggttacccagaactgaaacaacagagagctgtgagctgccacgtgggtgctgggagttgaacctgggtcctctggaagaacagccagtgctcttaaccgctgagccatctctccagccctggaaccaatgtttttaatcaaaggtgtggtatgatttgatttcttcttcttcttcttcttcttcttcttcttcttcttcttcttcttcttcttcttcttcttcttttgatttttcaggacaggatttcacagtagctttggagcctgtcctggaacttactctgtagaccagtctggcctcaaactcacagagatctacctgcctctgcctcccaagtgttgggattaaaggagtgcgccaccaccgcctggcctgacttttgctttatgaagaatgatttgggagggctgcagaagaatcgtgcaggcatgcaggaaagatgctctgtagtggagtaagaaggaggtgagaaaaagcaagagtcagggagtggcctcattccctacgtgatttcagagcacgccttcatcaggtagggcagtgggggtccacatatgattctcattaaactctgaaccctgccgaccttgaactcatccacttgcactgtccaataccaccgtgatcccacatgactaattaagctcaaactaaaataaaatcagactcaaaagtcaggtgttcaggcaccagcgccacatgccatgtgttcagctgccactgtggctaatggcaacacccagagtatttccatcaacccagaaagttctatatagaagcgcttctttagatgggacactcaataagccttggtttcctcatctgtaaatgaaaattataatagttccttccagctgggtgtagtagtgaacgtagaaggcagatagcgagtttcccaacagccagagctatatagtgagatctcatctctgggggaaaaaagttagtgaagacctgccccgattgactgaggcaacacacctgtagagtaagtactctgccagcctagaactttacaaacattcatttatgcatgcacgttgctttcactgggataaggtgggtaccaaaaggcataggagccatctctgagatgtttctgaaaaaccttaggttcgtaatctggaaccttacccaggcaaggagagagtgaaaagaggctgatctctgcatcagttcccagcgacttcaaggcgagagttgcgcgtcgcgcgctccctgcaggcgacgcggcgtcctgcttctcgagatcgtggctcggacctaccgccagagggcgctgcgggcggcgggcggggcgcggggcaggcggagtccaggctagggctgccgtttgcgagcgtgagacgagcccactgggactgtagcgggagcccagccgggactgtcgcgcgggccgcgccggcgatgccgcgcccccgggccaggctgtagcggggctgcggccggagcgcacgcgctgggcaggcgggccatggaggtggtggacgagaccgaagcgctgcagcgcttcttcgaaggtgagagaccgcggggaaggctgggcgaccaacctccttactctgggatatgccagccgatctcccccaggacgggactcccatggggttcccgccatgcaaggacccccagaaagcctcctttgggcagggactctactccagactagcaacagcgaggtgaatggcgaggagatcggtagtctccaggtgtctgcccatgcccgttggtcttgggcttcccgtctgccttcaaaactcagcttcattggggatgggttaccttccgtgctaagctctccttagactctttcgggtcctgcagtcccactaattggtgacactccaatccttggcacacttctccactctggggatcctgtatccactttcctgctactccatccatgccaggctcccactccatctatcctggactttccatatcccttaagactgggaccccagagcctagcctatcccctagaaggtgggacctcctgactgtgcttcctggaggttgagacacccttggagactgtgatgccctttgagactgtcacctgtcttggacaatgctgcttcctcccttaagactgaaattctccattaaatagctactgcttccctgcctggggcagggcatttccttcagtacgatttcctagagatggcacccccttgaagctggcatctgtgccaccagctacctccgctcttggagatcttcgcggtgctgtaaatggcaccccgtcagtcccatgaagcctccttaggactggatccctcacacctgacacaggagttatgtttgccccgcaccaggagtgacctggtctccctcaccttgacctgtctccagcggaatctatgcacgccctgctatattttttcctcacccctgcactgactttagagtctgtctctagtctaaatactgcctgggctttcctgagcagctcctgaccctcttccaggactgcccctcccccctgagagctgggttcaggagggaagggactggtgtgggagggggatgggaggtgaaggctgacatctcccagcctgcagggtttctcagaccctcactggagcatgaggccgggcagttgaaccccttttgtatctatccccgctatgttgggagcctagtctctgcccttcccttttgctagcccctaagctaacatcttgcctctaagtacgggaagagccttccacgagcacaacctgttgccctggacatatcaggctgggactattgaatttcaggatggaaatcaagacccaagtttaaagcccagtgtctagtttttgagagatttccccagggcaagaggccctttcttgtctctgtttctctttctatgtcttggagaaccacagaatggacttttgtccactcctgcttgctgagcagcccaggagaggacagccccaagtctcagccatcttcactccagggttctgagcacctaggcagaacaagtcctaagagatctgaaaatgctaggcttggactcgatacagtgatcaataactgaggctgctgggccatctgagggtgcgagacaacatccctcaattccaggagcttcctttctgagctcaggaaccgtaaagaccctaagagaggggagaagtcagtggcccttgtggggcacaggtacagattgcgggtgtcttatgtctgtttggtgtctaatgacccatgaagaagcaggaccccttgattcctgaaggtatctgtaagcttccgcccccaccctacccccacctgggctctgggcacaggggcgggcctaattggcctggactcctctcttctgagccaaactttccctcctggcctgagaagggggggtgggaggctgacgccacagcttagccatgcggttgcctggcagggaggctgtgctgctccctccagagagataagaggagactcaagaatgtcagtggggagcaggcggggtgtggggcctgctcaggagggccaggcttcagaagtctcccagagcctgggaataggggcaggctgggtgggcacctggtccaagtcttctaaggctatctgagaggggaaggcatggcagggaatccgctgggtgatgagatgggggttctcattatgaggtgaaggagcctgagggagcaagcacggagctgtggtgtgctcataagtgtgagacccattgaggaagtgtaaagccttgttttatggatgaggctttgtcattctcagctcctggcgacagtggatgctctcacactcaaatgggacccttgagtcctcatccatattcccacacagcgtctgggtagtgggcagaggtctccatggtttgggttctgggctgggagacagaatatctcttgctgaaggggcagtcttctaccatgaggcccttcttctaccatggctctcactaacttagcaaataggggcatgtcctgccctgctctgggtaggtagtaagactgggggctaaggcgctttgggcctttggtgggaggctgggacagagcgtccccctcgaggctggtacagctgggtccccgtgactgcccagttaatcccctggagataggcactagcggttcagagtggagggcacaaggcctgtagagagcagaccctccgggcaggatgcattggctcccagcaggtaactgggtataggggatggtctgtttctcttcacctgactggtggggaccctgatctcttagagccaggtcagggatggagtaggaccgtattgagagggcttgaccaagacctctaagggtggattcatgatgggtcactgagaactgtgtgacccgaggcagggcctctctgggatctttttcctcacctggaacacaggagtcagtggcagaggtctccatggtgtcttctctctgttgaaccttctgtcccaatcctgggacagaatgaatagaagattctgagtggaggtgctggcaatggtgctaggggctcatgttgtctagctagtgtcccttagagcagttttacggtgaaggggagggtggtggtttggatactgaagggaattggggtctccagcagattttgaacaggccactgtgagtttgggggccgatactggcctcctgggctggaggaggaggcctgagtctcaccttttctgaacccaagggtgagtctggactgatactgtccgctctggcttgttttcctgcatggtaagtcagtggaccagagtaggggcttctaatgcgatcatttttagacatccaacaaacataaactcctagcctctgatgggatgaataaggtagactgcacagtgctgagtgggagggccagaatgaacccatttcccagggagcaaaaccaaggctctgagagacaaggttagctgggtagcctaggctgactttagtcccaggctttctcttctgccctagttggtgacagcatccttgcatcctctccagagggcaggagtctcaggtgaaggctacctggtaactcaggagggtagatccacccaccatctgctagttgggctgtgagaaaggggtggctttctggcctgtgtcacctgtcattggtgatgcacccaggagcaggtgggtaggaagacatcagatgtaagctttccttaatccctcagattctgtttcctggggaagagacaaaaggcctcctgggcccacctggaacccaccccgcacccccatattcccgccgccccactcaagccccactcaagacttatgtcccagccccagtctgtagtgagctgctgtctgggcccacccttcaggccctgagccaggtaggaggggagagataatggaggggtctgactcatccctgtgtccccactcctatcacagagccacacaaaacagggcagcaggatatgctccctgccagtggagaccatgatcgatcgatccatctatatgtaacaggagcctgaggtggagatgtgtcatggaaagccactctctgggagtggctagggtcatatcaggggtcaggagagttggttaccagccccttggtcctgggcctttcctcattgtgggggtgctgagcagaataccccttgaggtcttaggcagagccaagaaggctatttggggacagaccactctgggtagagtggcatctccctgggagacctgcccagacaactcccaaagggttacagttctggggggccctggcagcagaggctactactgggtagctaccaagctaggctgctgattggctgttgcccttggactttgccctccctgataaggacaaagcagaaatcattaactggattattaactggggtggccccaccctgagtaggcagcctgccttcccttcctcctcctcacggcctaggcctcaggcattcctctgcacctcagtttcccttggttgggggtggctcctcttccaacttaaggtctccagccattaccactgggtatgggtggcccgtttatctggggctggatagttgatgcaaggattgttttttttttttttttttttttttttttttggtttttcgagacagggtttctctgtgtagctttggagcctatcctgccactcgctctggagaccagtctggcctcgaactcatagagatctgcccgcctctgcctcccaagtgctgggattaaacccgtgcaccaccaatgcgatgcaagaattttgtgtgctcacaagtgtgctgtgggtgctgcagctattcctgttatccacatggccttcctcttgggtctgtcactacagctggctattgtctcagctgtcaaaaggcagtgcagctggactagttatttagtagtcacctcccagagcttctgtggggttgtgtaagatagtgcctgtgcagggcctggggacagtaccctgcctgcataccagccctatttaactaaccgctcatgggcacacacagcctcttcgtatggcctggggtagatgacatgtgcccacccttaggattattgatccactcatgcctcagacttgggctcaggtttccaagctggtgctctgtgctttaagagagaccttcaccctctctgagaacctccaagatgacggcagtcatcatctgttgcgtgtattctgtgttcaggcaactgtactgtgatagacttggctttactttgtctggggacaggtcttggtcctatcacaccagttaagtctgtctcttcctcaatcttggagatgtgggacctgttccgtggaacagaaaggaacctggtctttgcctgttagggcatctgggctgtagtactctgcagatgttccccctgcagtcctcaacacagggggagagagtttgtaagaccccttttctaagagggaggagctgaagatgatgctccacgctcatgcagggtagccacagaaacaggaattctgaaccacaattggagctctcctaggggtaggtagggaagcggatcgcattgcatactgagcagcctgacctgctggttgccatgacaggcgatgtccagccttcctggaccacacagccctcactcccatggtcaaggctacagagagtgagcagggagacccatagagtgctgaggccagaggcagagagagaaaagagaggggaacagaagaagaaagtgcctgggtgggacacagttggctccagtgccccgattggcctatacaaagctggacctgtccttatccctggggttctgctttccctttatgtctggatagggtttgtggcctttaaaccaccctttaagtaaggcaaggcattgcctttctgggggacttgggccagtgacatggattcgctcagtcctatctagctccagctgcagctggtagaagggtctgactttgaactatggagaggatagaaggaaagaagaggggagatgcttgcgctgggggaccctgacccaggaataggaaactgtgtcttgggaggtatggcagtggggccagttgtatgcatgctgcacttgagacgggccttggaagtatgttgagatataaaccagaaccaataggcaggtacctgacaggctttgtcactactgccttgcacccttgaaactacaatgaaagggctgggagggggggtgtagctcagctggtagaatgcttacccagcattcacaaagcactaacctaaccaccccacccaatccttaagtctaagccacagttgcctgtgttcactcccaattccgaaccagaaagagaagagtccccgccccacccccagctggccttcagagaccctgctcttcaaggagatccagaatcacagatacccttgggctacagctacatcctcccttggtccctacacagcccttaccttatgctcaggataacacaatctgaactcggcaccaagatgctcccaaagccaaccaatctgtagccagttcttaggaaacccacactgttcccagagacttgcacttcactttgggggcacaagaaatccaggggcaaagagagccccacccagtgctttccacccttttttatggtaaccagggtggacctgccacacataccatgggaggatcctgcagcacgaagagcttggctctccatcaagtactcctgttgattgtgttaacacaccagcatgatccctaagggtacactccaagagatctgcagcacacacctgcatgttctacatgggccccttcattcattcaggaaggtttttcaaacccccactgtgtgccaagcacaatgctaggctttagagacagaagaagcatgccccctgccacatgcatttgatactgtaaaagacaaagtcaattgacaagttaatccagcccccctctctttgatatagggtctcatgtagctcaggctgctcttgaacttagtatgtacctgggcatgaccttgaacttatggttctcttgcttctacttctgagtgttttagatttacaggcatggtccagcacacccagttatttggtgctgagaatcagacttcgctgcaggcaggctacggtgcctctctcttctggggctctggtgagaaggtgggggagcatcgacagctgtgtcttaggcggaaggatttgctagaactagagctgcattgctgtcaggtgtggctgctgggccctaactggctgaaaattggatgcatcagtgcaatgagctgcttgcacaaccaagtatcggagctgcaggcattcgatggcgaaggctctagtctcacctggcagcttgaacagctgggccagcaagcagttctgggtattaatgaagatagaaagtccaggtccaaggattgtgacaacctactgtgccttgctgctgtgtggattgattggagcttgtagctctattcatactaggagaccgaccatggcactgggggtccgctgtggctgggtgactggggagggactgcctgggcaggctagaaagaaggcacggaaagcatccccactggctgtgctggagaagcaacatgagcagtatggcactggtcatatacctggagagacttagggacagacatgggccctcggaaacgcaaaggtacgggaaagctcaaaggcaccagtaaagctgcaccgcatgggcagaggcaggaaggagggcaggaatggagtagggacacttaaagggaagaacagagtggctatgttgactgaagatagctttctggggtgcctgaccatccatgtacacttggtagagaaggatgcggggcggctcgaagaggtcaggaggtcactctgcaattaagctgaggcccatgttggtagctaggcctctcagaggaacacaaggatgccaaggtaggaagcatgtgactcaagtcactgctagagtcagggtaccctcagattcagacacctgaggttgacactcagggtcttgagccctggtgccctggctaccctgggttcagatcagcccaccctgcccatggccacgtggctgacgggatttccgccatgtttggggcatgaattgacaagtgctccattgacggggcaggggagggggtaggcagggcacaagactcccactgtgctatgtccccaccctccccacccccccaggacaatggccaagactcagccagcagccacagctggtgggagggaggcatgagaagggggacagggagggtccagggtggagggaccacctgggtccctgcctgctcgcctcctgcacctggcttggatgttctcattcccttgtgcccagatgagtaatcttaaaaggaggagaaaaggggaggctattttcccacagcctggaccctggcctgcctgggaagaaacggcatctgcatctggctcttgtttccagcaggtaataaagggcctaattagtgtggaggccctggggcacaactctgggacaatgtgggacatggagaggccctgtctaatcctggcctctaggtcctacatgacctgtccaaggtctccatgcctggcaaggctacctctagtccctggctcatcattttgttcattcattcatgctgtagctagtaatcttgcctgctgtatgctgggattcttagattgcaaagacacccaggagccatagcccagttcctgccctggaactataggcaagatagccactctccgcctcagactcttcccctatgcaatagaggacggtggcctcataggagagatgttctttggcactcacacaccttctccagggaggtgccagcctggtaagcagtagacagcctgccgtgaaaggagaagaggggtgaaaggaagagtcatggctgccacttgggctgggattttggataataaaaacctaccaaagaatgagaattggctttctctggtagatgcagcagcatatgcaaaggccctgtgggtggtgtgtttgtccttgacaggaaggaagcaggagctgggcttcagagagtggcacagaggaggctgggaggcaagcagaaggcagccagtgccacgctttggacagctgaggggctctgacttttatcatttgctgggcgaatttgttggaagattggaggaggaggaggaggaggaggaggaggaggaggaggaggaaagaactgattggtgacattggggtaccactttctggatgtggggccttgggtggcctgtggcaggtcagtggtcactttccaggtggtcttgaggatgggggagggggatgacacgtttcctgtcttgagtctccagccctgcaggcgctcctaatttggatccagtgttccttggttctcttggcagtagggcagctctcctagagtgtaccttgaggattgtgtcctctcctgggcccctggagggctctattccagcctcgagatccccaggctcccacaagcctctgggacaatagagatatgtgaattgctggctaggctgggacccttgcagtgtcagggcagtgtgaagagaagacaaggctctcgtaaggagaaggagatgggggggtgggtcctgcatgcctcaggaagcctcagcgtctccccctccagagtctgagacccacctcaccctgccatcagcctcctcctcccacctccgtcctcccggaccctggcacgagagggtccctcctcccctagccacatctggttcttgttagggtctcccaggatgcctgggcctgaggcccccatcccccaggggaggtgaacaggaggattaggggcgattaggagtgctcctggccagggaaggaggggcccaagaggaggggctgggatggttataaacagcagtccatgaccacatcagcccatcactcacccaaggtgccaagttcagtctcaaaaacctgcagcttcagcagctggtgcagagtgggggtggggctccaggctctcccctcttcttcagaaaccctttagcaatgctgtggggctgggggaccaggctgggagaagacacagaaacattggctacacctttctccccaggggtcagattggctcatttttctgtgtggctttggggtaaggagtgatcatcctgaacaatggggacagaggtagcagcaccaagttcgtgggactgattgagtgtaaaacgcaatgtgtaaagtgcttaaatagtgccagacctgagagcatgagcctcctggccagggaaggaggggcccaagaggaggggctgggatggttataaacagcagtccatgaccacatcagcccatcactcacccaaggtgccaagttgtcattgtcatcaacatagtatgaattcaggactggtaggcacttcctaatgagctgccatcaccaacaatgttacttttcccattgttaatgatgggttggtaggatttagtgacacactgcccatgaagttggcagaatgcctcctatatatagtaaactcagtgatgggtatggcacacaataggcacccaattactgggagctgtggctaccagaaatgagtgaggtggaattggaacttgggcggacagactggccatgtacagcctcacagggcacggctggcactgaccatgcatggtgggtgggtgccctctgttcccggctggggtgagcctgggtgggggtcagtaggaggccctggcctgtcgcaggcagcgtgtgactcctaggaaggcttagccactcatgctcattaattcattaatcacctaagcggggctcagcattcttcagatgccaactgaggccagggaggggcctgggctgggggttcggagaccccagggtgctgggcttccggaggtgaagacagcccctccatttgcagagctcccaccgtgtatagtgcgtcttatgatccatagctttacagttttacagccatcacagtttctccaagaaacagctgttcatctgccattttcctaaggatactaaggcccaaagagagtatggcctctttgaggtcacacagcaggctgagttgggtggggtttgtcctgaccagcctgagccctgttcccaggactccccagaggaaggactcaaggtgctaacccaagacttaaagctccagatcagtggttcacaacctttctaatactgtgaccctttaatacagttcctcgtgttgtggagacccctcaccatgaaattattccattgctacttcataactgttaattttgttactgttataatcatcatgtcatatctgatatgcaggatgtctgatatgcagtccctgtgaaagggtcatccgaccccctcaggagttgagaatcactgctctagagggtcgttcctgcttcaggggagctggccactgggtggggtgtcctctgttatcagggttgacgcatctctcacgtcagcccccttatcactcctccctttggctgccacactcctcgccccacaaggtgaccctgggagaggaaaggccatcaccaccccctctctttccttgccatgcccaggagccctgaattgcatttctttgtccttcccctttatggggctgaggccaggggaggagagcgggcaggcaaacaggtgggaggtagaggagcagagcgctggccactttcccttcctgcgtgaggtcaggacttactgtgcctctctcatcctgtctcccctggagagtcggggctgagctccccactcccagcacaggggcagggggcctagccaccagagatgggccacactgcctctactgatgttgctctccagctctctctgaagctggggccaggggtgcagtggttccttgaatttctgggtccctggctgtgtgctttgcccaccagacctcatacctccacgtgctcaaggctgggtctcctggaaggacaggacaggaaaagtcattctgggtctgtgctgctgggttggtaaggtctcgcttgctcctcagagcattctgtaagatggaggggcagatgagagggatgcagatgagcccgccacatagccagagaaaagatgtggaagggcaagagtgtcttctctgtccccagccctatacattaggccgctgacctcctgggaagcagggtatccttgagggttgtgggcaggcattatttttagaggggcatcagggtggacattaaagaccatgcatagaggggagctgggtcttgtgtttcagagcctagcctgaggagggctggtgggctctaggcctgggatcttcagagagctatctcaaatccagctgcccctgctttgcaggccatgacatcagcggtgccctggagccttccaatatagacaccagtatcctggaggagtacattggcaaggaggacgcctctgatctgtgagtcacctcagctgagacctctgggcagttccctgcgggaggggatggaacttcccctcctgcctggggacctgggggctgagcctcctcccttccccacagctgcttccctgacatctctgcaccagccagcacagcctccttcccccacgggccaccagccatccccggctccagcgggctccaccatctgagcccccctgggagtggaccatcccccgggcgtcatggccccctcccacccccgacctacggcaccccactcaactgcaacaacaacaacggcatgggcactgcccccaagcccttcctggggggctctgggcctcccatcaaggcagagcccaaggctccctatgccccagggtgagtgggggcagggagtgggtggggacaggacacaggggcacagtgaccactgtctggtagatgttggcctatggactcacagtgggtagggcttagatgacaggctcccttatgggtaggttccaataggggtgacaccaggctgataggagacttgtgtgcttttttctgaggccatgaacagtcagtcaccagggttcttaagaacagtgaggacggtagtgttagaaaatctcaaagcaatgatgggacagaagcagaaagacctgggaccccaatcaacacccacaggaacccgaggacactcccatgctccatctacccagggagcatttaactctgacattttctgtgttctgagagttgagggtctcaggcatagcctcttacctcttagagctaaggtagttacatcccgaggagggcttcgctctaccagcctcccccatctctctacaactgaccacagtgatatcctgacccatagcccagccagcatccagactctgtggttctcaaccttcctaaggctgtgaccctttaatacagttcctcaggttgtgatgaccgccgaccataaaatccttttcattgctacttcataactgtgatttttcttactgttatgaattgtaatgcgaatgtctgatacgtgacccctttgaaaaggtcatttgacaaccctcctagggggtcacgacccacaggttgagaaccactgcttgagagcatgttcaaggggtgttcctcaggctttccagagatctcagtgaggcagggcagaagtcttgcctttaggtagaaggctacaaggggcatagatgatgcagtgtctggcaccaacccagtcctcccatttgtcagcttttgggcttggtgacctacaacctctgccagaggctgggtttcctcacctttcacacgagccccacattcatggtggaaaccaagtgggggaaagcagagagaagtattgggtaggtgtatttgacattgtcagcagggacccctgaggacctggcttagggtgactgtagtggaagaagctgcctgagggtggaggggagacagctaagggttagcagacacaagtgagctccttgaccttcccctgaaccagctctaggtggcccctgcagagcttgttcagggtcacatgggcatcctggtgtaggctttgttctaggcaataaacaacatgtgccccataatgggtggcgagggaagtatgaatgtattacaggctgagggtgctgctccgggatggggtaccttctagtgtgggcaaggccctggagcccctctccagcactatgaaaataaaataataccccactatacaggacataacaagtgagacgatgaaagaatgcagggtcatgtgagccgggccatttgatggcggggactagagggtgttaaagatgctgggggagccaaagaacactgttaagaggtacagggggcaggtgggagacggactgggtcagcacatggactgagccacagtgagggatctcaggccctactctgtctacttttccatgttgttaggaaacctgttttgggggggtccacatttttatttaaggttcttggttttgaactcaggaactcttcatgcacactaggcgagtgttcaaccgctgggctacatcctgcccctcaccccaccccttttcactttttgaggtgggttctcactaagttgtccaagctagccttaaactcactctgtagccctggcaggccttgaactcgtgatttctctgtcttgagcctcctgagtagcttggggtacaagtctgcaccagattccggatccttattcttgaactgattttagagatgtaatgaggcccagaaaagctgagggtgggggtgggatggggaaaagtgggcatggcttgttcaggggtgcagtaagattctacagacagcagggatgtgttcataagaaccttgaagcctttctggtggcccttgggcatggtgcaggggagtctctccagatgtgggcatgagagatgacaaaaaaaagtcagaaccctggtcagccacagtctctctctgagtgagtacatgttctgtacaggacgtgttgacctctgggtttgagtttgttcttttgcctgaaccactgataaaataaaacttgcaaggaaaaaaaaaaaaaaacaaaaaacaaaaaaagaaaaaacaagcctaggcccagaaaagctggctccctgcccagttcacaccccggtggttcacacctgcctctggcaaggcaattcctggtgacccactgaaccacctcagacccagcccccaggtcctaggatttccaggaagctgaaagctttagtgggtgcgaagggaggcagaggcctgacccctctttctgaggaggggcatcctccaccagagacctggccactgacccacaaataatcattattaggtctggatatccagggcaagatctcaaagtccttcacccacactaaagtgctggatcctcccagggctctaggataggtggacagagataccctggataccctgggatatctgtgaggagatctcaatggtgaagatggtaggggtaggggtggggtctttgcaaccctgcccaccagaagagatagctgcctggcttgagggttgggtctgggggttcagctgctggcccaacagtctccctcctccgcccccttcccccgcagcacattgccagactcgcccccagactcaggctctgaggcctactcccctcagcaggtgaatggtgagtccagcgggcagtgccaccctccccctctgggtttgggcaaatggttggtgcagccttatcagggagagagggaggagggagggagggggccagcggctgcccaacgggccagattatcgctggtcaaatactcctcggcgctgcctattgttcccccatgggcgggtggggagcctggtcttgcctcagagcaagtgtccctgctggtgatgccaccgtctggccccctgcgccatcatggatgcgccctttggcggtaagtggacagctgaggaaggctgctgccgggcccacctttacagggtgctgaggggcacattggcccccatgtggccaagagtagaatgatcatgggcagactgaagaggggtcaagagttctgtttatcctaccaaaacatccctggaatgtttcctgaggaacaaagggagctgcagccccctcaggctgggggactggcccctggaacccgagcagggctgctggagggaggaggctgggtgggggactgggctagggtcccccagagactctttcttcaggcttcaaaggaatgagactggggatctcctgaggggcttgaccggggtagcctaggggagagagctggctaggatagggaaccacccttgcacagtctgacttccctgctcaaactcttaattgctggttttccagtctctccacccagactctggcatggctcaggagggcagggaagcaagagaccgtgcctagggagaacgggcgaggtgggtctctgactcctgtgccccatctctttctcagacccccatcttctgcgcaccataaccccggagactctgtgccacgtgggagtcccttcccgactggagcacccgcccccacctccagcccacttgccaggccctccaccacccccgccacccccacctcactaccctgtcattcagcgggacctctacatgaaggctgagccccctgtacccccctatgctgccatggggccgggtctggtgccccccgaactccaccacacccagcagactcaggtgctacaccagctgctgcagcagcacggagctgagtaaggcttgggcagagcctccttggcagaaaggtggggtgggagttagggcattgagagtaggggagacaggtgaccttagagaaaaacagaggccctacagaagtgatgctgggaggggcctgattggtgacagctacccccttcacagatggctaaattgaggttctaaggaaaaaaaaatagttttcccaggtcatggactagtaaagggcagagccaagacttgaaactggaactgaatcttcaatccagaccccagtgcctttctccctacttactggaatccttaggtttttgaaggtgacaattgcagaatgctgtatgtgacacagatgttctgtgaaggcacagacccctgccctcctggattccataggggtagggataagactgtggcaaagagtctttagaacgggaacactgagtgacaggctgagtgacactgagtgacagagtactaggaaggtacctgagggcctcctgtgggaagtgtcttcctgccgggcattgcctgctgaaatggtgctgaggggaaaggggtcggcactgcacaggagaaggctcaggaaaggagagccagccccaaggtacttacctctgctccccaggctccctccacacccctccaagaaaaggaagcactcggaatcaccccccaacaccctcaatgcccaaatgctgaatggaatgatcaagcaggaacctgggactgtgacagccctgcccccacaccctgccagagctccatccccaccatggcctccccagggcccgctctcacctggcaccagctccttacccctcagcattgcccgagtccagactccaccttggcatccaccaggtgcaccctccccaggtaggtgactgactggcctttggtggtgagtggaaaccctgggcttagatctgacctggtgttctgtcccttcaggcctcctgcaggacagtgatagcctcaatggctcctacctggaccccaactaccaatctatcaaatggcagccacatcagcagaacaagtgggccaccctgtatgatgccaactacaaagaactgtgagtgatctgtgccacctagccaccttgtcttgagacagcttagggtaccattgaggtcctaagtcagggcccgggagcactctgggtataaaagaatcacatttgacagaaaagccaacaagctcagggaatcattaggcccagggctcaggcttagggcctctggtcagcccagatctctctaaaggtctctaccagggaggggctgtaggagccgggtcagggagaagtgggcagaggcatgtcttctggcccctcctccaggttctcctccgactttccaggaaggtagcctgaagcttagcataagctgggtccttacagcagccccctctctgtggagggaggaggagtggaggggactaggggtgaggctgcccagagcattcctgttccttcctcaacaccacaggccccaggccaagaacccagtggggaccaccctccttcctcccctaataggccaggtacgtcagagggtgacacccctcaatgtactttggacttagccaagcaagaggtagatgactggggctctatcgtcagaacagtagctgagacaggcttcctggagtgggtgccctgagctgtggaatttccatccagtagctaagggcatccactaagggctgggtagggtgggatgcccagttgtgatggccactgaagtgatctagatgacacttataggatctggtccctatgccttggagagaaatccctctgttaatacctccatgctctttgggcaccttgctatctccctatctaggccccaaggccagagagctagcagcagaggtgctcggtgtggctggcccaggtactttcgggtattttcttaggtcacacagatgggcgagccctgtaagagaagaaagagaccaggcctccccttggaccttgctagtgggtggggaagcacccctttccctgtctagctctctgtgggtgttaccctctaatccatggtaactcagggcaggatgagtcaagtccgaagtcaacaaagtaaagtagtctctttactacccctggaggtgccctaaaggctcccgacactgtctccgagacagatggcaagcttcagttgttcctgatggggaggtcagaaaccagaagtactcccctctctctggggcagttgtgggagtcagaatgagggcactgggggccttgagcagggggtgggccagagtgggtcagggtgggcccaaggcagagctggctcctggttccaccgtttccatggcaaccagctgtcaggcacaatgagactctgcagatgcagcccctctcatcccatctcccacaagggagggggcttcaggcaatatgtgggaaatgggtaagtgtgctgaaggtggccaaggactgagtgccctcacttctggtgggcctttagagccttgacttgtttccttcatcccagcatgtgacagtgagtggcccaaggcaagaaaggaaaaactcatgcagctcctcttgggggtgtagtctccacctctagaattggcctgacccctcggtggtttgagaataagtaacagcattggaacatgggcctgtagacagaagcaatggcccacatttggcttggggaccactggtgaggctcctcccttcccccttcccgctcctaggcctatgctcacctatcgcgtggacgctgacaagggcttcaacttttcggtgggtgacgatgcttttgtgtgccagaagaagaaccacttccaggtgaccgtgtacattggcatgctgggtgagcccaagtatgttaagactccggaaggcctcaagccgctcgactgcttctacctgaagctgcatggagtgaaggcaggtttggggttcagctaggaagggagaacaggaggggccaggaagctccaagatgcaagtgatgaggaaatacaccacagctgaccaccaccactccacctagatgcggggctcctcagacctcaccatctcccttaagctttgctttcttccccaccccagaccccaagtcttcatctccaagccaagacccatcttctggccctccaactgatacctcagctctcagaaccaaaacaagctccctgccacttgtccttcttccctgcttcatctcatggtcctggctactcaagccatatatgtagggaccctcctaccctcagcttttcatgcacttggctttgtttggaggctctggaggctctggagtagtctttacctcctctctttggcctctcccttggcctgagtcaccctcattcccatgtctgaatatacaatcagcttctactttgccaccaattcccatgacacatgtggttttagtacactcctttcctaagactctagtgtcttcccactgtctcctaaactgtgcccacaagggcgttagaaatccacccccatgtgctgtgttccacattgggacttgtagagtcccatcccagcattctatcccgttcctcttggcagactccattctgatgtccctctgggaaacctgccctgaggccctttatgttccatagcacagccactggagcccatgagctccctggggacaagacagggtgtgtctgattctgtcacagagtgcctggcatgttgacgtggctcagtcactgtttctgaagagatgagaggctgtgggtatatgagagtggctagggtgcgctatgtatgtgtgtgtgtgtgtgggggggtggctgcaggtgagaaggctgtgcaggtatgggaatgggtcataaggctaactggaagacacgtgggcatgcatggaaaagttagccaaatgacatggtgatgtgttgccatcatggaggtgaccatacattgccatgcagaagtaggggaagaaatgaactgtcatgaactgtgagctgacatgaaggctatgtgtgtgtgtgtcattgaaatgtcttgggagtgtggagtgtggatgtggaggcccctgagttttcgagaaagtgaggtggggacagaattctgctgtagaccagggtgaggggatgaaggaggaaaggaccaggtggcaaaccttgtcctgaggtgccctgggcctattcctctccagctagaggccctgaaccagtctatcaacattgaacagtcacagtcagacagaagcaagaggcccttcaaccctgtcacgtgagtatccagccctgcgggcatggtgcctggaagggcccgtcttagaactggcttgggagccagggagacaggcaggcacccacagtgttctgtacctgtggctgccctgcagtatggctcctggcagcccccttttctgctgcctgagcatcttgccatcctctgcagggtcactcttccccctgagcaggtcacaaaggtgaccgtggggcggctccatttcagtgagaccactgccaacaacatgagaaagaagggcaagcccaaccctgaccagaggtgagtaagccagcctgcccacaggaggccctcgcttctgaggagcggggtcaaaaacggacctccgtggagcatgccaagcgcagggtccacataggcctgtttccaggaagaagaacttgtggttcaaaatatttggcagatttagggactcagactcagaagactggcttgtgagttcagaaacatttctggggctcctactggtggacccagagaagaattttgccccctagtggaggctcatgtttctcctctgtgggatactgtgataactccacctcctggggtgtgatgacagatggggatataagcacccatctgtgttactgagtgttactgagtccccggtgtatcccaggtatttcatgctggtggtggccctccaggcacatgcacagaaccagaactacacactggcagcccagatctcagagcgcatcattgtgcgggtgagagtcgtctccccccaggggcaatacctcctccaaactggaagaaatagcatcaggaaaatactatgaaatggggttgggttgatgtgtagctcttgttgggcactgaccgagtggctttgggctttgtcaccctatctaggcctcattgccttctttgctgtaaagcatgaaggtggctcacacctagtagcctcctgggtcccacaagtgactcaatgttgtcacaacgaacagggacatggtgggataaggagacttgactaggaagggtattcctggggttttcccttttctcagggccccgaagttccccctaactccaagactgatctagacccaacttgccataggcctctaacccaggccagtttgagagtgacagtgacgtcctgtggcaacgggcacagctgccagacaccgtcttccaccatggccgtgtgggcatcaacacagaccggccagatgaggcactggttgtgcatggcaatgtcaaggtcatgggatctctcatgcatccttcagatttgcgggccaaggagcatgtgcaggaggtagggatgaggccaaggtgagaggcagtgctgtgggtgatgagtaggaccagtgggaaggatcaggatgctagggtaggggtggggaggctgactctgtacctcagtaccagggtctcccttctacactgtagccctcaggctgccatccagatgtacctgaggtctgtgctggacggcagctggagggaaggagggctcagtgttggctctatcccttggcaggtggacactactgagcaattgaaaaggatctctcgcatgaggctagtgcactacagatacaagcccgagttcgctgccagtgcaggcattgagaccactgcaccagagacaggtagagatgtacctgtgtcccccaagctctggccagtttgtcctgtctcttggaacctgttcccagaaacccctgcattgacctttggagttccacagtctgaaatatcaacccctctgctaccggagtgttatgcctcccaggtctttggatccctacccttgggctcatcatctaagagtcacctggcctgaaatctttgtcacacagcattcagagattttgtgtcctctcagagcctcacctccttctcctaagatactgctaggatcctgcctaccccacaaatcttacatctcgagcctgagagcttctagaatgtgaacagttgtctgagggagcccctgcacccagggttcctcaaaattcaactctcaggtacctccccagaaagctatgagcagctatgggacaggaccccctgccacacactctttgcttgtcctcaggtgtcatcgcacaggaagtgaaggagatcttgcctgaggctgtgaaggacacaggagatgtagtctttgccaacgggaaaaccatagagaacttcctggtagtgaacaaggtcagttatgaggaaggtcagaactagaggaagctgtgggacagaggggctggccagtgggtggcactggtctgcagagggaggaaagaagggctttcctgctggtacctccagagtcccttcccaccacacagaaagggggccagtgttcaaaatggaggggcaagttaaccgctgtagactgtctggtacagggcaagatgactcccactgagagtacactccccgacccccatcaattaaaagagggtaacacagtgtgtcacctagttgtctcaaggcttaaaggtgtggtttattatgaaggtaacatttgtaccttcatgtggtgtcatgaaccttgtgtacagagacggacacatgacacattttacttacctgagggagtaggtccgagggctggagctctgatttgagagaggcaaggttgtttaggtagacatttagtctaggcagggggcagcagacatgctgtgtgaaccagggtgtggctggagcagagtctacctccaggcagggatatttccagggcctctgttgactgtggagagtggggattctgctcctgcccccatctagcccacaacttgggagcttcttgggctgatggtgccctcaaggctgttgttgccctggggcaggagcgaatcttcatggagaatgtcggggctgtgaaggagttatgcaaactgacagacaacctggagacgcgcatcgatgagctggagcgctggagccacaagctggccaaactgcggcgccttgacagcctcaagtcaaccggcagctctggcgctttcaggtgggggtgctgggtggggttgggggccaggagagacctcttctggaaagcatcctgacttgtcctcttactgcagtcatgcagggagccagtttagtcgggcaggcagtgtcccccacaagaagaggccccctaaggtggccagtaaggtgaggctgtgcagggttggggagctcatagggccagggcctcatcaccatgccccctcccttccagcttgcaccactccaaactccttgactccagcgctaacccctcccgtctccactcttgaccttgtagcccttccagccctttcttgcttcctttccctttgaccatgaagaatggggatggggagattgggcaaggaaatggggttcctaagcccaccatcttctgctgtcttctttcctcttggtccccagtcatcaccagtggtcccagaccaggcctgcatcagccagcgtttccttcagggaactatcatcgctttggtggtggtcatggccttcaggtgacttgtctcttaggttctggggaggctggcttagagagcagagctacccagtgggttggatgtgcctgagtccaggccctggagttagggaggaccatggactggggatagagcaactggggtcagggaaggtgggctgcctagtctgtctcctccggggtctaggaaggcctgtttgcagacatcacctgggaagactagagtcttccatagagagacagttttgggtggtggcttgcattcagacagtgacccttttctgtggctcccagcgtggtgtccatgtccacactgtatgtgctgagtctgcgctctgaagaggatctggaggatgctgatgggtatgtcccatgctgctaagccctcaggccagacaggactaataatggagggtggcctgggtcagaggcatctctctctaatggggttcaaccttaggcttatagcccgccagagcctattggggagggagggaggtctcctatatagtgggtgctttctacaggccctccctggcctgctcagtactccttcaagtaggccgtcgggaagacacttgtgggaaaaggggtgccgggaaggagggtcagagcaggacattgggctctatctgtcactgtcatgtcccagctcctggggctacctctgactgtatcttttctctctcctcccctgtccatctccctcctggtctctctattgtctcttagctcttttgccgtgtccacttcctgtcttctggccttcctccggccccagcatcctggggggagtgaggccatgtgcccatggtatgtgtctgaccaagcacccctccctcctctggctcctgctacccttcttcctgcttctgctccacattccctctccaccacctcctgcccacccctgcttctctgagactcccagcccccaccctgggctcctccaatgcctctgagctgagcccacccttccttagcaggtccagccagagctttgggaccacgcagctccgagagtcctctatgaccaccggaatgccaggcacacagccctctttgctgctgggtgtgtgtctggagggatgaggtggggcaggtggctgggtgtggggctccagtgtcctcctccagctcatatagcttctggcttcctcagttaccaattcagcctcaggtccagctctccgtaccttggacctatgctccagccagccctgccccgtcgtctgctgctccacgcccacctctgttacagatcctcaccttggccccactgctatccctgccccaagccccaggcccagccccaggcccagccccgaccactcaggtatggatattttagggttggcaggggtgtttggtattatcggcatccagagaaaggccccagagagaagacaggagggattcctggattggagattggggggatcacccccaaaggaaccagaaaacacaaaagggttcacagaagtccaggtcaggaggccaactgctccccttttctcaatgtatccttgcttttgtctataggtcccagccagatggccccactgccagtaaccaacatcagagccaaatcctggggcatttcagctaatggcatcggctatcccaagcactccaagagcctggaacctctagccagtcctgtggtcccctttcctggggggcagagcaagaccaagaacagccccagcctcagtctccacagtcgtgcccgcagaggagcccctcaacccaacccaagtcctgctcaactcactcagacccagggccggctaggtacttgcccctctcaacacctcatagcggcccagccataaggctgcctgggcacaggattgtcagtgggcagacactggtaatcaggccacaagcctcttgtaggtgatgccatttagtcctcacaacatggatgggaagatatctcagtagatagatagtgctgctttggaagcatgaagaccagagtttgatccctagaaggaatcaggtgtggtggcacacacgtaatcccagtgatagcaagatggaggcagggacaggctgatccctgcacctcactggacagctagcctcacctatttgatgaagttccagctaatgagaccttgtctcagacaaaaggaagaaggcactgttgccatgattcagatctgccatgaaccagaggcctagataaaggatcatatatacagcagtgagactaaaattctctcttcactttgccaaattccagatcttgtttactttgtctctctgtgccagggtggaaagggtgaggtactaggaccttaaccttagatctttcgttttaactaagatagaactcttttagcaccaaagtgttctttcaggctgacttgtgcgtgccttaaccagagactccacactgagatgtaggcttcctcactttggctttgtggctgtgcagacagacagatgttcagagtggtggggcaaccccgagggtggggagctcacctcagctccgtgggtgcttgagacatgcatggctctgcctgtgtgcagacgtgaagacacctcaaagtgatgggttcccaggagtagggagggaacttagtctaggacaaccaaggagggaagccaccagagaagacttccttagaggaggtgacattgagccatctttgaaagacatctggggtttgcctgagaagaaagccatcttgtctgaaccaggtggcttcacagggtatcgtgggtgctgctggagactcttgagtttataccttaaagaactgaaaatgtaccaggtcaagcaaatgttcagaggccagtgaccatagcttcccacttccgggataaaggactaggcagcagcaagcccgagatatcaaaatgaacatacaccctcaactccccacggcacattacacctcagtaatgggtttgttcaatgagagccacatgctggaggcagcccagctccagttgtgtgtacagctcttctgccctcccatggctggtgtctggatgccaggatgagcactgctgagcccagccagggctgggaagaaatgtgtgtggtcaggaacagaagcccgcgaaggggttcctgtacatcgctggtctgggaaagacctctacctgcttctgggtgtcttggttctgtggagacagacctgaggctcatgggaactagctgggaaaagggtgtggtggtgtgatcctgttgtgagggtctggaaagaattcttgctctcactgaggtgtgagtggaagtcccagggtgctgtcatttgtattccaccttgtccccttcctcactgcccaacagcctctcttcttacagacccagtgccatccctgagctccatccagctgctggagaattccatgcctattacttcccagtattgtgtgccagaggatgcctgcaggtaggctgggctccctcctgtagctccaaagagagccccttaggtgccatgagtccaagcagcttggatgctcagatcttggcccttcagggaggaaattttcccacaagttcgggcagcccctttccaggttcccaaggggctttggtacagaaggctgaggaggagaagggagactggcagagtggccttgctgaggtaccatctttgcccctctaggcacggaaacttcacctaccacatccctgtcagcagcagcaccccactgcacctcagcctgaccctacagatgaagtgagtgctggtgtgggggagggaggggccatgaggaagcctccagggcttcagaaatgtaatgtctaagtggagtgttccctgtattttttacacggagggcccaggctgcctggggaagggctgcagagagacactgctgcttggggttaagttgctataagaccctgcctcactgcgactacacgggatggtgggaggggtttcctccattccaagccctggactgttctatgtggttctcaggttttgtgaagtcttgggtagaattgggctgtatgggagacaggggagctacagctactaagatgggaaccccattccattaacctacctatcccccagttcctccgcccctgtatccgtggtattgtgcagcctgacgtcaaaggaggagccctgtgaagagggggcctttttgcagagccttcacccccatcaggatactcaggtaggggcaggtgggaagctgtgggctgattaggtcacagaccttcctctttgctggatagtgatcaccaaatgatggaaagcagaggacaagggtgcctgtcagaacacatcccgctgggctcctgtgcctgggggagggggccatgcatgtcagtcttcatccattctctgttgggcatctccatctcctgtgacagtggccaggggagaagagttcatagggactgatctgggatgagcacatagtgcccatcgcaggcagagctgagctccccacccccacaccccgggaggcaagtgtggagttcacaacccagcagggcagtgattaacagatgatgttagtagagccctgggtgcaaggtggaaggctgctctgaggtcctattgcagccccactcatggtgatttttgctcacttgtgttttttcaacaagcatttgttaaggccactcttgtctctttccctgtgctcccaagaacctgttttccagggagggagagaagacatgcataagataccttgagccaagaagggagtagatgagggtcctaagggagattcatggccttacagagagggagggacacttaagaatagagggacagccaatgagtcacttttagcagtggggctacggtctaaacccatacaacaaaggccaagtcaaaactcaggtaagacaggtaagctgttcatggctggccccccgagcagacctggggttgaacctagctctgccgtatgtgcatcttgaaggaggcaagtgactgtttcctgtctgtgggatgcagatggttgctgcagggttacattcattgcactgcagttatgggcagggttaatgagatactcacacaagcctagagcacaaggagctactagacacagggaggtcagggctagggaaggcagtagtctgcagagggcggctgcctctgctctctaagtggaatgtgctcatcctgggctgtgatggccatggtgtgaggaatgctggttaggactaaggctgccctgacctttctctctcctctctctagggcacctctcatcggtggccagtaaccatcctgtccttccgtgaattcacataccacttccgggtggcattgctggtgagcacataggcccacctgcccacagaggcagagggtgcttctatgcagtgtggggcttgggagaataagggcctttgcaaagcttggtagggcttgggacaaccacctcacccatcctcacatcccttctacatagggtcaggccaactgcagctcagaggccgtcatccagccagcctcagaatactacttccatttctaccgcctgtgtgactgagctgcctcctgaggcagcgccacagccgggattaggtccctgggtcctcaacactggatgcaaatgtgttacactggagcctgctgcaggccagctctctgctcttcactgcctccccttgactggggagactggaaatcttcacactggagctgctgggcaagctggccaccctcacacagcatagagggagctagagtgaccagcatcctgagcctttcttctggccacctccttggggcagcaaaggaccaatgcgtggctgtctagatatggttgctggagggctgggcgcaaaggtcctgtaggcaaggggaagctatgtccctgacttgtccactcccaactctccatgccttcccttctgaggtgtggtggagaaaaggcccatgggggttggacccagacctgtaatacctagctggacacatgagtccatggagagctagtaactctcaccctttatgctgttcccaggagggacagcttggtagtagactttctggggtttgactgttacactagacctggatttctaagctttaatgtggttggttcaggggagttctccttggtagcgcttagctcctaagaattcccaaggcagtcagggccagccctggatggctggagaagctgaccctgtgtcttaagtctactggtgcctgatggaaccaccctcacaggcctgaaccagtgggggcgataggccaggtaagccttggaccccgagtttcgagtatcctgggagtttcccaagctcatgatggagttggtgccatgatcattctctgagcagaggagcaggaatccctgcaagcaggaggccggtttccgctggaaggtggatgcagataacttttattaatgatgtaattactaaatgcacttaaaccagggcagcaaggataggaaggagcaggaaagctgagtgggcctcacttggagggacactagtagacaggaagatcctggtcccccccagatcaaagttcctctctccaggcttggctccattcttggtgggccccatctctgcctcttccacccccaggaaaaaagtcgtgggtttgaattagattttacccaagtgacagcttcagtattcttagcagcacctgcagcattctgaggtcacatgcaggctcctggaaggagtgctgcagtcattagtcacatgtcatgagttcggcagtgggaacggggctgctcataccttgtggtattctgaccctttggacagcaggccttgccttttccaactcccattctcagctctaaatgggaggcctttgtagaggggagctgagtcccaggagctgccaactgtgggttctgccatggatctcaaagcacttatccttcattctgccataggaatcatggcccccacatgaggccatgcctgccttaaaccactctgttctgccctcctacagtgccttactttgactgcgcagccccactgcttttagtagcacgctggagctccctcaccagagggggagtgttcttagacggtggcccctcagtccttaactggaaagtgaccctccactaccccctggagtccatctggacacagcaagtctaggtccattggcagctgcctgtttgcatgcctggggaggggtcctcagcatgagttggggccaaatttggactccaagctgcttgagggggtcaaccttggaccaaagttgccttaagcctcaagtataaaagggcttaggggaaggtaaaagggccacaggttggaagctgacagctggctggccctcctttcctctctcccttctggtgtgttcctatagccactgggctaatctcccccttgctttaagctgtacataggctccccagcacagacccctgcccaagatgtaccccttagcggtcgtgttcatagagcgtctcccttcccattaactgcccatcttctccctgagctctgactcctatttatcatgtactcactctgactctgaggaaggcagagggaagctactgggcctacttgcttcctctccccgaactgtccttttcttctgaagtaaatatacatatataaataaatgtataaatactgctttgtatctgaacttgcctcctggtgtcttcttgagattcttctggtgggagggaagccacctcaggccaagctggctagaatctaatttctgagaggcctagagcatcctggcctccacaccaaagggccagaaagccactccgtatcttcatgccccccattcttggattcgagggttgggttggccacacagacctccagcaaacctccatgaagccaccactgcccaccgagaaagaatccctctaacggaacaggctgagcctagaggaccacagcccagagaagggtggctgagttcagaggagactggcccagggtaaaagacactgctgctgggtcctggagaagtttgtttgaaaacaacagagaagcatgcctgggcccttcctatccacaggtgggcctcaaagcgatgacaagatgacactgtaacagcccttgcccccatgaagagaacataaatccccagcttcagcagctaagacgtagaaaaggcagtactttagtcaagagaccaagtaacctccccccccccccaacaagaatggacatgaggcaggtctgtcacacatctgcctttattgtaaacagcaggtgggatacttgtagcaatgtaaaaaattaatttacaaaagcagggacttggtgaagctgcctggtgggtacctgaaagaggaaagcagaattaagaatgaggccaatgaccttctacattccctccctgcagccctattcttgggcaaggaccgtgtatgagtcgacagaactgaagatgggtcaccagaactgatcttcaggaacctgtttggtgctaatctgttttaattcccagatcctttccaagccattggtttgacttgaaagaatgcagatgtaaaatcgtaagtagcccttactcacatccctaccgagtacaccccaaagctcgagtgaggccctgagtaatgtagagaactcagaactgaaacaccaggtcacacttggctcaaatcctcatgaggggtggggagagggtcctgatgtaccccagtgtttctgtccccatgaaccagggaagagaggggaaagcttcttcgggcatgtaccatcttgttacagctcttacccttgggaactcatacatagatgccaacccagagcaggaggaagaggactccaaagcccatgaagagtgaggccaccaaggagatgaggagctctttgtaaatatcacgtgtgtactttgtggaggtgacctcgtaactaggaagactgttaaggagaagcaatgagagctgggtagtggcggctcatgcctttaatcctagcacttgggaagcaggggcaaacagatctctgtgagttcaaagttagcctggtctacagatagttccaggacagccagggatgcacaaagaaaccctgtctcaaaaaacaaacaaaccagagagagagagagagaaagagggagagggagagagacagagatagacagggagacagacaaagagagatagagaagcaaagatggactacaatacaggagctgtctaggattactcaacatggggaaacataggctaaggcttcttaggaggcttgtctggcttggtagactaaggggcccaagagataacatagactctgatgctccataccacacctcttaacacccatgaggaaaagaagcccacagtagttaggccaatcacctctaatcacatctcactcatggtatagctaagactaggcaccagactttctgacacttgagcacacccttgcttaaatcatccttctgctgggtgtagtggtacatgcctgtactctgcagaggcagaagcaggtggacccctgtaaggttcaggtcagccatgtctgcacagtgagaccctttttcaaaagaaaaccagccctctaaataccaacaaaccaccttttgaaccttggctcacagtctctagcaaactgagctaacgacgttggaaacagggccatggcctgcccttaggcatcaccagccttctcctatactcaccttgtctcaaccccaccacaaaggaaaaaagtagcagggcacagttacccaatgtggtttcttcctcagttcttacgccactagttctggttccctggctgttcagtaaaaggatacacgaagaaccaggcggtgaagaacatgccaatggccagaagtaccacagtcaggtgtgggaagacagccgggttgaccgggctagtgtaccgactcatggcctcgagctcctagggaagaaagatcagttttagtttcaatctggggagaccctggaacagccatgtattattgagactgttagaggcacatttcagcctgggaaatgcagaactccttcaagtaatttactctgggaatggaaattacaataattttgtatgtgtgtttgtctctatgtgagtgtgtgtatgcatttttatattttacacgtttatctgctctgtgagtgtgggtgcaggtaccatcaagtgcatgggcgatcagaagacaatttgctaaagttggttttctccttacaccatgtgggtcctaggactgaactcaagttacaaggctggacagtaggagtgttcacctgttgagccattttgcaggtcagcctccctatccactttttctttaaatttgtgagaaggctacaggacaattttctgagccactttctgccgtgtttgaggcaagatctctcttgggtttttttgttctgttttgtttttggtcactgtgacaagtactccaggttagttggcccccaggcttctgagcaattcttctggttccattttccatcctgctatctgagttctgagattaccacatctggctttcaaaaataatgtgggttctaagatgcaaactcaggtttttggcttgcacaccaaacacttttacccactgaaccatcttcccagccttatagtcacatcttaaagtagggacatggcaagctttgtagtagagcatttgcatagcatgaatgaagtcttgggtgtgatctccagcactgggaaaaaaacaaaacaaaacaaaacaaaaaaacaacaaaaaagtatggaggcagcagcttttcttttggtacgataagagcagctgagtcagaggctcaggcataggaagggatagagataaatggctcctaggattttctagccagtgatcactaagacaatcatggatctgtctggagaaaaaacaaagaaaaagcttgtccacaatttccattgcttttggacctgtgtccagactctaaaccactaatttgtgcaggaagctgaagcctagactaatacgaagacctcaagttctaattcaagagcattcttaggagggaaccacagggatctcctggcagaagacaactgtgataattctggctttactgaatcactggagtttgagttacgtagttataacaagtattggtttcacaggtctgatgcaggattggagaaagatgataaatgttgacacatctagttgactgcctgccatggagtaactgctcaataggtatttgtttccttcctaaggttgtagagaagattatgagataatgcctgtgaaaggactataaatgcaaagttctgtacaaatgttaacttccattgtcacttgccagccaatgcctctaaagtccagaacataacaactccagagaagtaaactgaacccattgttctaagagacacaggaattcaattcagtaaacaattatgtccccctttcccccctataaaagccaaagacaattgctgccatttatggagcctccaattgcaggcccagtgtttggcaacaagaatacaaagaagaatagacatcaccccagaactagatgcacgtcagatggtggtcactaggaggcgtggcagataaaaaagaggtccacgaaacgtggcaagaggtgtacagagactgtaagagcccagaaaacagacaagtgcctgtgagagttgcaagtgtttcaccaggtaatgacatgtatccaagggccttgcgggatgaattcagcaagggaaactttccagatagcgataactgatcataggaaagagaaataaacgcgcgaaggtattcaacgtgcaccccacgcccctcagccttatgatcaacaatatcataagcccattgtgatggaaacctcagtctgagaaattctcggcaaggggcttgctttccccgttcctcagctaaacatgggctccagcagcgacccaccctggggacacggaatgctgacgactccgcggaagaacgcggtgtggaccggatacccaggagtcctggcccacagccctgtccgcaactcccaccatctcaccattttgccccgcacacgataaaccaccggtccaccaccggaagaacacgtcggcaagagcaagcgcgttgagcaacaggaagaggatgtggtccctcgcgcgtggcattgtgggacttgtagtcccgcggtttcaggtgtaacggtaactgggactctgaagacctatgtgagtgacatggggttggaatgtgagagggggtagtgcagagtctctgttttaatccgttttccccggaaataaggtccactatgaaagctgcggtctgaagtggcagagactgcactatatttcccaggaggctgttcgcggagggcgggtcacgtgaccggagcgcgggctttggaaggcggcgaagctggaaacgacttcggctctacatcagaagaacgcgctcgagtcggttctgaggactccgtggatgccggaccaccgctagctgccgagggagggtgaggcctcgcggaagcggtgctgagagcgacgagttaccgcgggagcagcaccaggcggccccggctttgaccattcgcgctgctgggagcctccgtctcttcaccggtaggaagtaggtaataacctttccccgcgaggactacggccttattttagaaacactagaaacgacttgttcagtccgtttcctgcccgggtctgcggggtactgcaagaggaagacgactaacagggtattgctaggggagtttgttagctggcagttcggggattccgaagcagaacctcagtccacccggagagagcagagcctgtttctccgagggcccttgtgaggaggttttgtacctcttaggaaatgggtccaaggtctgctgacatcaagagacactgcttgcgtccttttctttctttctttctttctttctttctttctttctttctttctttctttctttttcttccttcctccccccctctccttccttcttcctcctcctcctcttctgtgctgttttttatttttttattttattttttttttggtccaggatatttttttaaaaaaataattttatggtcattggtgttttgcctgcatgtatgtctgtgtgagggtgtcagaagccccgggactggagttacaggtatgagctgccatgtgggtgctgggaattgaaccccggtcctctggaagaacagccagttaacctctgagccatctctgcagcctcccgagacactgtgctttctgatatttctggctgagggaggcgttttatcctccatgcagccatttcatgtaagggtttgctatctgggacatcctgtggaggcgggactgagatggcatcaagacagaacagtgtatcctctgtgacaggatgggtgctgtcttgtactcattctagcaaagcagtgagacatgaaccagagcactgggtgggcaacactggcacaccatctggtgatgtgtgctttccacctggtgttggccagttttgcaaggcagaaatgattctttcacaactcataccacagagtaagtgccttaattgtgtttcacagagctgaagatgtggctcagtgtagagcgcttgctggcgctagcatatgtgaggccctaggtcagtccctgttgttatgcacaggacacatcaagtggtttcatgggtggtggctggattcgaagctgggctttttatttgatttctggtgctggggattcagccggggacttcagccttgctaggcaaagctgctgtacctgtgagctataatcctcagccctaaggctggacttggctgcttgtattcataggggaaccacaataatacagacaggaagaagagaggaaggatggcaggaagaacacacggctgatcgaaagagggaggtgggacttttaattaggctcccatactgtacaggtagattttgatgctgttcctactgaggtgttgggactcaggaaggggagtataagtgtcacataggcttcagagaagataccatggagtaagattgggaacaattagaactcctaggatagggttttctttcttctttctttggtttttgttttttgaggcagggtttctctgtggctttggaggctgtcctggaactagctcttgtagaccaggcttgtctcgaactcacagagatccacctgcctctgcctcccaagtgctgggattaaaggcatgcgccaccactgcccagctcgcttgcttgcttgcttgcctgcctgcctgcctgcctgcctgcctgcctgcctgcctgcctgcctgcctgcctgcctgcctgccttccttccttccttccttccttccttccttccttcctttctttttttttcaagacagggtttctctttataacagtcctggctgacttggaactcactttgtagaccaggctggccttgaatgcacagaaatctgcctgcctctgcctcccaagtgttggtattaaaggcgtacactaccaccggctgcctgataggattttcttgtgtggaaacactatcattgggcaagcaagatgatgctagtaaattatgtattagaaaatcctttttattatatttaacacattaaaatatgactgatatatgcaggttccccccccccacacacacacacaggatttctctgtgtgtactcctggctgtcttggaactggctttgtagaccagattggcctgtagaccactgcctgacacatgcagttatttttgcttaaaatggattctctttccaacttaagtttttgtttgttttttgagacatggtctcactgtaactctcgctggcctggagcttgctatatagattaggctggcctggaactcagatccacttgtctctgccttccaagtgctaggattaaacaggcatgcgtcattgcccagcagtggtgcacacctttaatcctggccctcgggaggcagatagacttatctctgtaaacttgaggccagcccagtcttcagagcgtgttctagggcagccaaggcggttacacagagaaatcttgtctcaaaacaaaaaaattgttaaaagccaggtgcacgtctttaatcccagcacgtgggaggtagaggcaggtagatctctgagttcaaggtcagcctggtttacagaactcagtccacaaagaaaccctctctcaacacccccaccccactttccagcaaaggcatttgccataacacaactagtccttctccccccttcttttattttattttctttaaagtccatttaaataaaaatattcagtgaaggaaaattctatttcagttggaaggggcaaaagttgtgagtgtaattttggaaacactgtccgaggagcaatttgatccttgaagtcttgaacgacagaattacagtattgggctgtgtgatttcagcttgccagcccttaattcaagacctgtggtggcatcatgaggttcatgtttcagaattagtggtggggaggacgtacaaaggatttaaacctcctccagcatcctgctaaaaacaaactcttaggtgctgaagtggggagggatagcagtgtgtgagatggtcacctgaccctcattcagaagcgtgtccttcagggctgctacatcagttagataactgtagagcacagtaagtcatacatagccaactttgcgtagctggtatttccaggctctcgagggctcacttctgcctttatggtctcaggctccttcaagccaagccaagcattcttgttttctatggtcctgatgcagttgaaagttgaagtcattctttgtgtgacaaattgtaccgttgtgttgttcttaggaggcctgctcgttaattgggtgcgctgtagatgtcttgagaatgatggatgtatgtgttcacctttgcatcttcttctgctttgccgacttggagtcctgttgttttcatgttaaatttgattaaacatgaagttaaactggcgattgctgccagttagagcctttgttccttttgccctccatgacccacgtttttcttgtctttgttttagccatcgctcctgtgttaccatgggaattcaaggccttgccaaactaattgccgatgtggctcccagtgccatccgagagaatgacatcaagagctacttcggtcgcaaggtggccattgatgcctccatgagcatctaccagttcctgattgctgttcgccagggtggggatgtgctgcagaatgaggagggggagaccaccagccacctgatgggcatgttctaccgcaccatccgcatgatggagaatggcatcaagcctgtgtatgtctttgacggcaagccaccacagctgaagtcaggcgagctggccaaacgcagtgagaggcgagctgaagctgaaaagcagctgcagcaggctcaggaggcgggggtagaggaggaggtggagaagttcacaaagcggctggtgaaggtcaccaagcaacacaatgatgagtgcaaacacctgctgagtctcatgggcatcccgtaccttgacgcacccagtgaggcagaggccagctgcgctgccctggtgaaggctggcaaagtttatgccgcagccaccgaggacatggactgcctcacttttggcagccctgtactaatgcgacatctgactgccagtgaggccaagaagctgcccatccaagagttccacctgagccgcgtcctgcaggagctgggtctgaaccaggagcagtttgtagatctctgcatcctgctgggtagtgactactgtgagagtatccggggcatcgggcccaagcgggctgtggacctcatccagaagcataagagcatcgaggagatcgtgcggcggctggatcccaacaagtaccctgttccagaaaactggctccacaaggaagctcagcagctcttcctggagcctgaggtgctggacccagagtctgtggagctgaagtggagcgagccaaatgaagaagagttggtcaaattcatgtgtggtgaaaagcagttttctgaggagagaattcgtagtggggtcaagcggctgagtaagagccgccagggcagcacccagggccgcctagatgatttcttcaaagtgactggctcactctcctcggctaagcgtaaggagccagaacccaaggggcctgctaagaagaaagcaaagactgggggagctgggaagttcaaaagggggaaataaaacgtgtcctccccctccattgtcccctgaccccagaatgtttgctttgtgccctcagctagaacactcctcttgtggaagagcctgctccgtcccagaactgcccttcagagccttgcctttcatacttggtcttgtggcaggaaggccacagctttgcttttcctcatttttagctcaggaatgatgtcaaaccacttctcaggcaggttaatggacactgcatccattgttgtgtgaaactgaaagcaacacattataaaaggaggaggagataaagatggcttggggtgggagtgtggggagataatttcctggctggtcagctggtgaatgggagttgacagtagaccttgactgctctttctgatttctctaacctgaaagacagccatcagcccaggctttgctgatggaagacctgcaaagaaaaggggcgagcagaggaggttggctgacaatggctctaattcctgactggctgtcttgtggacacagcaagtttaggtttctggtgagtctacagtaacttcagagcagtgaaaaagcagtgttttaggttttgaattgtagttttgtttttgtcccattcccctctccagtgctgggaattgaacccagggcaaagcaagcaagcataccactgacctgtagccccaagagacactgttccaatggcctttctgaggcaatcaattgaattgaggttttgagagaagctgttgttcctgtgctgtttctgttttaaaagatgcgaagagaaaaaaaaatcaataaaagtacaaaagtgaccagaatgtggtgttctttgaggatatttgaaaacacccttagtgcttccggttcctgtagaatataatgatcttttgccactaaaattagatgacaggctgggattgccctggttaacaagtagtttgtttaataagagtgaccacaaagtggcgccatacaccatgtaatgtgggcacagcagctgtggttggcaccagccctttgcacttcaggagtttgaatgcctagactggatttctcttgttccacctagtctgtgaggtaaaggagtccatttggacagtcttgtaatttagataaactttgtcataacatccaggcagtttgttttgccacttggtgaacagatgccatttagaaaccttgctcctattgagatttcaggttctcaggatgactgcaagttttagagtactggtgcattaggtttctcttgaggaaccaagtagatagaatgagttctatatattgaaaggggttcattagaggagcttacaggctgtgtccagttagtctaacaatgggtgtctggtaaaaaggccaagaatttagtagttgagtccacaagggatgtttcagctggtcttcagtctacatgaaggctcacaaagaagcaggttctaatactagagaaggaatgcctcagggacactgagggtgtacaggcaaaaaacagaagcttccctccacatccttttgtgtgggctgtcactggattgtgttgggcttcctcaaatcctccacacaggtgagcccagctgcttgggttttagttgattccaaatgtggtcaagttgacaaccaaggtcagctatcacaactggtaaagctttagtggggagctagcctgtagttctgatcttacagttctgaaacagcatacaactttccattggaaatgtcttaacagattgagaagatggatactatcggttttcaagtccttaaaatttatcgtatgatgggggcaggtgtgtgtagcggcacgtgtggaagtcaaggacagatttcagggttcttctccactgcacgttatgaagattgaactcatgttgtcagggcttttatctgccttctttgcacagtggttttcaatctcctccctagccctgccccacccccacactacaacacacacacacacacacacacacacacacacacacacactgggtctcactatgtagccctggctggcctggagctccagtagaccaggtaagccttgagtttatattattctctaactgaagccttgggtgaatgtagacactataaattatatcctgagggcagagtggaatgactgccagattaaagcgagctgtacttatttgagtcctttttttctgattccataatttgattatagatctgcagtggcagtgagctaagtaagtgcccagactgtatttactgttcagcacagtggcttttaggggcttgcacccagtggtgggcaagcaagcctctaaatagttctggctccttttaagtttgatctgcttacccttctctaagttatctgggttgagcttgcacctgtgaatgccctgatgattgcactcaggagaactgtttaagcacaatgaagagttaagaggcattgctctgcagtctgaggcagcattggcaaagagacaggcaaacaggacttctaggcataaccatttcgaaattagaaataggcttaaagagagaaaatgatgcaaaatggaaagttgaaggaccagagggtgagacattgaatggtgacatccatgagatctgacaagagtacctcagcagaacagtgtctccatagatgtatcatgggaggagcctggctttgtcagatcatccttgcatggccagtcacagtcctgcccaggttatacaaggtaactggcagtgatgtgtcttctaaagggagcagttagaagtaaggtcttttacttacttatgggaagtcaccagtttgcctaacggttggccagcaagctccaaggatacaccttccctatgctgggttatagaccttcacatggcttttacatgggccctgggaatctgaactcgggtcctcatgggagcacaggaaatgctttaccggctgagacagctcccctgccctgcaccagggaatctggtagacaggttcggacaagcagcgtggattttaaatgaataatgacattctttggtccaaattaatgtttatttttagtctcatcaggatgtggtaacagcactgacacatggatactgacattaggcccaattaaagggaacaacaccgttggccaggaagtaggaagatgaatgtaataaagatgaacatggaagctggagttaacaagctttcgttccaatgttctgccactgtctacatgagcagaggtgacttttctgactttattttcttgtcagtggagttgagatacctcactttatcactgtcacattctcagtcttgtcactcaacgtcccctgcggctgtgccaaggccacagtggaggctgaggagggaaggccacagtggttcaggtgctctgaagacctggtcttggcacaactgagctcgctggtatttgctcagaccggccgtgccacacccttaccccaggtggcagggagcaggcatggggagggacagcacctgttctggaaggaaggagtcaaataaaggtagcattcttccattctgattacccagcctgcttcaaacagggccaatgagacctgagctcttctgcaacctgcccttcctgggcattgtcctgggaaacttaaggaaccctgtaccaacacgctcaccttgaccacctgccatttctccacaaacgtgttgtgctttgccttctgctcgaggttctctaattccagacggacggtcagtatgctttgagtagacacatgggtttgtggaaggggagcatgaacgtggatgtgcagggttaggcctctcggggcatgttcctatgttctccggaagggtgagttacattgttcttactttctacaaagccagaagattacaaaaccctatttcattgttagactgacatgctttgtcagaagttatcctgaattcctatctgacctccagaagaataagacacttggacaagttgccaggaggtcagatcgtactgttcaatactggaacacagggaacagggatgcggccccttagggcactgacactttcatgatggaaacctcagccccttgtgctgatggctgctttcttgaacttaagagactgacataaaaggaaactatgggagccttggggactgattaaaagaggtgaatgaacagatttttaaaggccatccattttgcccaaagctaggatctcatgttctctctggaacctggatggaacaggaagccagagttactcatgccaggatcctcccggggccaaatgctttttccaaaccgtattcctggctttgccctgcctgcttctcccagcagctggagacagacatggttacaaccagctcttggcagcaagctaagctcctgagcagggagctgtgccaggcttcaggattctatgcatgaatgccccctttctgagtcttgttgaaaggggtcacactggcccacagagactaacagggagggtagagtcagaaacatagcccagtgagatgggttcacactttacaagaggggaattctagggcagggtccctgcttcatgctgggctctgtagatcccccccccatttgcctctgctaaagtagaagaaacaacagaacagctttgtaaccctaaccccaacagttcttccttccctcaagtttggcaccaagaaggcaaagggggcaggtatgagcacacacatctatgtcccctaaccctttgaacattgattcatagtggcattgtccctcaagctccctctgctttggctccagttgtcctcttcctcccccagatggaggactgctgctgctattggtgaagataggcgtccaaccagagctgccccgactccttcagtgagctgtagggaccacaagagcagacagggagggaggtgggggctgagttgtccacctgcagacatgtccccttcccctcagacgtcttacaccctgctcagaggaagctggcctggccacagaccgataccactctgctgttgccatggtgatgcatgcccctgcggatgacgaacccaccccacaccgggccacatgcacaccaccctgctgccagctccccgggctcatactcactaaacaatgtcggcgaaggctgagagcaggggcttggacttgtacttgatgccgtacttggcgcacagggattgcaccaggggtgccactttgtggtagttgtgtcggggcatcgtggggaaaaggcttcagggacggcagggtagttagtggcttctgctcctctgcccctcccccacccactgcttcccgggtctccctactcactggtgctcgatctggaaattgaggtggccgctgaaccagtcattgaaggctgattggtgaacgttacaggttgcctgcagctggggggagggggggagtcgggagggcaggctccgtgtcagagtgctcagtcttccctagggaggctgtctggaacggtcccctatccctctggtcacccccttcactgggagaaacctccagctgacaaggcaatgctgtttgaggagactttttagccattactgtccacccttttcagtagctgtggcatgtccagggcttccaagagactgtcccttacctgggtggagacccagtccacattccggtcatgatcaatgtgcatggggatatggttcatctgtgtcacccacacaaaccaattgctctccaggaacctgttgaatacagcagtcacaaacagtacaagcagagcacagtgttcttacagccagtagcaacatcagcccgtgcatgacaatcccccaaacaacccctattcccaagaccccagcacagcccccagccccatcccctgcactttccctgccaactgctacattccaccagacactacctgacaatgaagaaaaggcccaggaagcctttcagccccagcaggggcatgtaagtgaagaagacacgggcatagaagctgagcatccaggccaagtcctgcaggggaaacgggcgtggtactgtcccagcagctgtggctcctttccctcctcatctctatctgctgtagtcaccacctcctcctggtgtgtgatccgtggcttctctcagaggcctgtcctaacatctaaatgctgccagatggatgtttcaggaccaaggcgctgtctatgccactgcactaactgaagctccaggtccttttctgcagtgaaccaaaccccattctatccccacaacacttgagccctctgcaccgtgtccagcatccacgctcatatcttggttcctacctcatctgctcagagtctgtcttccccatattctatatctgaggccagctggaaaggcagacccagccaggtgtccccactttggggattcccaaagcctcttccgcctgcgtatcttctctcagatctatcacttccagattcatcctacattctctaaaagcagggaccaccccccaggactctctccctttgctttccgcacaattcctggagtgctgtgcagcttggaacctcagaggctagcctcgtgaagcatgcatgagcccaagccattgaatctcatctagagataaacatctccacctggttctactctgctctcagttgggcttagagacagcctctgtggcccacagagcacccccttcttcaagcagagtactggagaacctggtccctgggacttgcaggccggggatactcaccacccatttcttccgctgaacaacaaaatagaagatataccactggaagtagagaggcaacaaggctgggggtccaactggggaggaaaatgagacagggaggtgtgagcaaactgggggtgacagaggattgctatggtgagataagcccccaacatagaactgtctctggccagccctccttacttcctccctgctcctcaatcaactgcaagtcatgggcactgagggtgggcaggaacacaagcctggagaaggccaactctgcaagaggatgccagggaggccaaggactgggagcaatatcccttcctcgtgggaggacatggggagcttaagcctcaagcatggcatgtactctacgccaggcctttaaaagggcacactgatactccccacagtgcctggaccgcagccctgctcttgcaatcctgtcacattcccgctgctccaccaagcaggtcaaagggcaggggaagaactctgctgaccccacacagtctgaggcacacctgatgctactcagccacggcacgacaatccccatccagagcttcttcatcttgataggccacagattctacaattcttttcctccctcccttacacacacacacacacacacacacacacacacacatgatgcgtatgcgtgagtgtgggccatgacacacatggtgaggtcagaggacacacacatactggggcagaggtggtgactgcataaattggttctgtccttccactgtgagtcccaggtattaagctcaagtcaggcttttaccagcgaagccatctcattgatcttccatctttgtttttgagacagagcttctcactaaatgtggaactattctggctgaccaatgagcttcaaggatccacccgtctctgtgcccctcacactcttcccataccctgcgctgggattacaggcatgtgctaccacccctggatttttatgtgggttctagagatccaaattcaggtcctcgtttgcacagcaggccccagccctaaaataataataataataataataataataataataataataatttatgcaattattattattactattattattatggattttcaagacatggtctctctgtgtagccacagctgcagtagaccaggctggccttgaacacacagagatccacctgcctctgcctccctagtgctgcccagactaaaattatttttttatggaagtctttactcaacccttcgaccatgtccagcttcctctagaagggacagttgccaataagcagttcaaacaaattgcttcaattcttcccctctcttcctttaaaaacttgaaatccatgctgggtgttggtggcgcatgcctttaaccccagcactcgggaggcagaggcagtcggatctctgtgagttcgaggctagcctggtctaccgagaaagttccaggacaggttccaaaacaatacagagaaaaaaacaaaacaaaaaccttgaaatccatgcaggtgtggtggcttgtacctatatagcaagtttgaagccatctgagctacacaaaaccctctcaaacaaagccaaaacaaaacaaaacccataaaagtacctcctggttggcaaaagttgaagtcttaaagtagttttaaacccaattttgggcattatgcagcaggcttttattttatttttttggtttttagagacagggtttctctgtggctttgcaggctgtcctggaactagctcttgtagaccaggctggactcgaactcacagagatccgcctgcctctgcctcccgagtgctgggattaaaggcatataccaccattgccctgctgcagcaggcttttaaagcagggaatatataatcaaagtatcttctgctcagttgcaacatttcttctccagtcccattgctcgaggcatcgtcctaactgaccccacctttgtgtgactaggtttaagacaaggcttaaaactaaaccaggagacccctgctgactactcagtttcttcctggaagctagggtgagaatggaggactgagtttgtcctgtggcacaaatgactaacaacgtattaactttcctcagtgggaaaggccatgttctctcaggtggatagtgacagcaggcagtatttcttcctaggctcaccctaggggactctgctcctcccatgagcccctatccctgtggctggcactcactcaggaagaagtacttgtgctgatggttgtatggcatgtgcttcttcttttgtttcccaagctgtgaagaaacaagggcaagtcagcagctggaccagatgtccacacctccccacgcccctctgagatgccagctttccttgctcagacaccaaggcctacttccagaaccttcagctagctgctgctattggaaggcactggcaggcccagaacctgaagcaagtggccctggatggtgacctatgaatgtaccgtgacaaggaacacacaggagggcacaaagtgtggtctacaggactccttatggctaatctaaagtctctgtcgcatggtttccaggtgtccagccccctcctgtttctggtactctttgtaccagagtcctcagagtctctatgagaaactagttttgttcctgtgtaggtacttgggtctttccatcacaatcttttggactcttgtctttttaattttagtgtatgggtgttttgcctgcatgtatgtctgcaccacttgcatgcaatgcctttggaggccagaagagggcagaagaccatctagaactggagttaacaagtgggtgagctcccaagtgggtcttgggaatcaaacacaggtcctctggaagagcagcagtgctcttaaccactgagccatctcttgacttcaacctgaacttgataaacagtagaaaagttaccaagaacaatctggcaacctgaaggttttgtcaaagctttgctccactgggtggtttgtttttgtttttaaagccaaactactgaactgactatctgggagtcaccaggccactcaatcatcccagggcccctcacatgggcccatatacactctgctgccctactccatggctctggcatttcttgccctaattagttttggtgacctcagtccagggcacagcctgccttctcctatcacatatccacaaataattcatcaaaactgagttctgagccgggcgttggtggcgcatgcctttagtcccagcatttgggaggcagaggcaggcagatctctgtgagttcgaggccagcctggtctccagagcgagtgccagcataggctccaaagctacacagagaaaccctgtctcaaaaaaaaaaaaaaaaaaacaaacaaaaaaaaaaaaaaaaaaaaaaaacaaaaacaacccaaaaaaacaaaactgagttctgctcaagtgttttggctagacaaggcggcaacttccctgcatccatggtgtcattcaacaagcgctggaggtaaggggttagcactgttccagtcactgcctcaggaacggagagcacaaaggtgaacggtatgaagatcttgtctacatgtatcttgtaatttgaggagatgagactggtaataaatttgtaagcaaagttcaagataaattacagattacagagaggagagcaggacagacagaaaggtagcagctcaggcctggtttcccttgggccctgataaccgaaagatgaagtgccaggcatgcagaaattcaaagaaaggtgttcaaagctcagggcacagccagagccaaagctattgagacccaccacaacagaaggctgggaaagccaggttacctaggccctcagaaagccccaataaaattgaggtgttcataatctactttgtagctcaggtgggccttgaactcacttatagatggtctgctctatgttttgtgtttggtggctttgtccagaggtggggaagtaaaatgcacatgcagtcacaagggccaatgaggcagagatatgccaggtagcctgctatggtgtggtgtggtttgttccccaggtgaccatgctgcatgctgggtcaccaatgcaatgatgccaggaggtacagactgctgggagtcaatgaaactgattccagagggaccttagtaagtttcaccttgacagtgaattttctttttctttccagacagggtttctctgtataacactctggctgtcctggaactcactctgtagaccaggttggcctagaactcacagagatccgcctgcctctactccagagtgctgggattaaaggtgtgtgccaccaatgcccagagagaggaattgttttaaagtcaacaagataatctggcttcctttctcaccctaattgctttcacagccactcccaccaaagtctggcatctctcacaagtctctgcccagaggtcaaagtgatggggctgctccaccttgaactttcacctcccagaacaggtatcttttctttacaaagtacccaaccttgggtattttgttatagcaacagaaagtgggcaatttataatatagagggggcactggagctggagaattggatgggattaggatatagtctggagacaggtgaacaagccacgcaatattattgaccaaggagatcccactgaagaaaagcaccttttggttggggggtgatcaagtgtcactatgatctgccccactgtgcttagactcaaagtgtcccctgtacctccttgttctccaggagtgttaggaggcattgggcagaagccactaaaccagagcattgctacctagttaagctgtcccgagagaccaaaccacacccatctccatgccccctcatttctctgtgtgtgtgtgggagtgagggagaggtgcatgcatgtgtgaaggcatacttgcccacacatatgaagagcagaggtcagctttgggagtctctgttgatctcctttatttcttgagccggaatctcttgatgaacctgaagcttagtttttgctagactggctggctagcaaacccccaggatgtccctgtcttaacacttcctctcttctacacctggtgtgtgtgtgtgttgtgtgtgtgtgtgtgtgtgtgtgtgtgtgtgtgtggtgtgtgtgtgtgtggtgtgtgtgtgtgtgtgtgtgtgtgtgtgtgtgtgtgtgtgtgtgtgtgtgtgtgtgtgtgtgtgtgtgtgtgtgtgtggttaggcacagctgctgggtccggcttcctcagatgctgaggatccaagcactttagccactagccacctcccagtcccttctctctttctgatgttcatggaccagagttccttgaaaaccacagaaccaagaaccagcaaaggcctcccctttccttaaaccatctgtggtgacaacagaagcgcttagagccctaatgagcagtctgtcctgttttagaatgacatgggccagttccccactgtgcactgctgacaaggcagaggagaacacacataacaagccacccgaggcccatgctcaggaagtgagaaaaatgggaccattagggacagatggctatgagtgcccagtgccagcacagccagtgctgccaaggctcttccacacagtgcggctctgccagagaggacagggcagtcaggttatcttgaactcatgcctgaaaatgaactgtgctcaacagcttaatgcaaacattaagtggggggaggggagctggcagagctctagaacggtttttaattaacttttcaaggaattcctctgggcacttggaactttctattgcttatgctggccagtgagggagctctccaccctagggcattttttcctccagcagttacattgtagcatttgcgcacagcctcagctgacttctcagagccaatagggaccatgctaaaagacaggataggcccaggaggcaggggaaaggtacagccatccctctgtccacaaagattggttctagggtgtccagatactcaagtcccctgtatgaagtgacatactacttgtgataactgatacatgccctcccagcatgccttacagtagccctgcaggatgagggtttgttctctctcttttttttttttttttcttgagactggtccttatgtagctcaggctaatagcctcaaactattaattctcctgcttccaaatcccctgtgcagggattacaggtatgtaccaccatgcctggcttctttccttccctcccacctgatctttctttctctatctctctttttagtgctgtgtatggaacccaggactttactcaagccaggcaagcagctaccactgatctatccccccagcctccttccaggatataacaaatgctctctagactgcgcttatacctcatacagtgtaagtgctatgtaaaaatagttgttataatgtgttctttagaaagtaataatcaagaacaatctagagccagggaggtgagaagctccctgagagggctcagagcgtaaagcacttctgaggaggcctgatgacctgagttcaacccctggagcccaagtaaaagtggaagaggaaaactgtctccactaagtttgatacatactctcacacaatgataaataaataaagttgaaaatcccagtagggttggtgaggtggctcagtgggtaaaggtatttcctacgtaagcctagtggcttgaatttcatctctaagaccaaataaaggtggaaggagagaagtgactccaaaaaagttgtcttctgacctccatacatacaataataataaataagttaaaaacaggctgtgtatgttcaggatggatgtaatttttctgaatatttgcttaagtccacagatgcagaatctcaggatacaggagacagctgtatccagagggagtgttctgtgcactgatatcagagatatgagacagtaaagtcatagacaaggcaggccgtgacacagcagggtattccatgtaagacacagaaacgccaagtgcaagggagtggcttcctagagcagggtgtcaagtgcaccctgaagatgagcaggggcttgcacagaatgccctgtcactcactgaatcctttgcagaatgaggtacctttgtgtagtaactgtttgctgactgagtctgtcctggacagtaacagtttacagcctctcaccctccacaacttccagaaagcaagagcccgacagcccagcccctggtcctaccttggctgacaatactgagcaaacactttccctccacctgcagaacaggctactctctgatcccgtccgcacagatgcccagctcacctccacagagaggaccttgcccaaggcgaagaacaggggatgcatgttgatgtctgggtctttgcggaagcagttgggcttggcatggtgctggaaatgcatgtggttccaccagctggcaggagccccctgcagagaactgcagatgtgagtgaaagcccagtgtacaggacccgagttcaattcccagcacccacatggcagctcacaactgtctgtgactcctgtccacaggatctgatgcccttgcttgtgatatacagacatacatgcaagcagggtacccgtacacacacataataaacaaaaaaaaaaataaaaagaaagaaaacacagcatcatgagcccttctcccaccctctggcggccatgaatgactgggatttggggaagccccatcaattcattgaccttcaggtggccaatcacgaaatgatgtagcaggtggttccatgtagaagtgccaaagactgacaggtgcccaaagtcatgctgtagccaaccggcctgggcctaaaagagaaaggttagtgcccacagcagcccgtacctagggtacccctcacaagcctcagcctctccatactggattggtgccctacctcaagggaaccatgggtaagccatggaacctgggtcccaattccctcttggccactgggtcacatgtaagtggaggcagaccacagtcccttctttcctctgaagtgccatgacttaggatagactggcatccagaatacagacggctagtccaaatcctggtgctagaccatgattggcatgctgggtgatatcagcggcgggaagggagtcgagcattggttcttggcatacgtggaggagtgtggtagaatctgaacccgagatttcagagagcaaaccacacaggaagaaggggacctggggaggggagctggagggctgtgagcgaaccaaaacatgtgcgtgactaaaaggatatggaagtcccacacaagagaatgtgtgttctctccctgtgccaactctcctgtgtatcttcagatcctaggcaggattcttggccttgatgttttgaatcccaggaatgccaaaggcactcacctgaactacactgagcagcactgcacagaggaagaagggcaccaaggatgttccaaagatccaaagagtgagccaggcagccacatccagtagcaggatgtggagcaggtagaacaggaagaagaggtgattggccttcatgaggcccatccgctccaccgtagcccgcagttcccggaactcatcagttagctctttctgtgggagagtggggctataattcttcccatcggcaccccaaccctcacagagaacctcccatggaggtagctgtgggaagttcacagtcttcggcaaacataccctgacagggaaggatgatctgacggaagaagctactatgaatgacatcatgtccagcagctaagcagacttaatttgggttcccactgtgtaacctgaggctctgcagcttaaactctgagcctccattttctcatatgtacatgtgtaaagattattatattagtttgcattggcacaccgtactcagtaaatgggtctgcagctggcgatggcattactggaagagacatgtcaccccaggactattctaggctcccaagaactgtcacctgtgatcctatgcaggcacctgcccctctccctccacaaccaagtctccaaacagcaaacggggtctctcacattcttggtgggttcgaagctgggctgctctggagccagctctccgatcagaagagagttcatatactttctcacaaggcccttgttgatgtggaacgccacgaaaggatcctgcaagaacagggagtagacaatgaggacaccccccccagcccaccaggttcctaagggcctcacaccaaaggccatcctctaggccagcctctaggccagcactaaagtctgcacccacgctgaagcaaaagcttcctccctctggctactgcacttctagctagctgtctgccagccccagatcacccagcatttgggtttccactgaaagcacactacaccaaagaatgggaagcctcccctggatgcaattcagagagacctgcccaggctggccttcatgtctacagacacttggtgcaggaatttagtacaggagagaagcagcttgcaggaataggtggggttatgaggcttttgttcctatagtactttcaacaagtccttttctttcttagccagcttctctataaacagtgatgaggaagactccctatgcccgagctggggaactgttcacatttcttcctctttgggcacggtttcctatttcccccaacactaaccactcactgttctagagttaatgtgggttttacaaggtgggtgggagaacctcaggccttagggaaagaagtggaggcggagccgtgggcagtggcaccacacatccagaccaatcgctgtctttgcctgggcccccaaatcatgctgaatgggaagcctagatagacagtgtgcacagagactccacagacagtgaaggtagacagtctgctccatatgtgcatgaatcggtaggattgcactgccctctggactctggagtggtcactactagtgactggctctatttagcctggtctcttaagtctgtggggttttgtttgtttttatcagagtgccctctacctctcagcatctaaccctggtcaccccggaagcatgttagactggcagagaaggaataaggggtaggggagattggcttagaagacagatggaccccaaggtaggaatccaacagttggcaatctgccacagagcgctctgctctaacttttgagtgccaaggaataagtctctcccagttccaccctcggctgtgagtaagggtatggtctatgaagagaacaaacagagccaccagacagaggctgggagtgggcactgactcgacctgcagtaaacaccaacggaaaagggacgctatcctgctaagtgtctgatcacctgggggccttcttcccgaaaaagctggagacctccctctcaggatcctaggacagttctgggattccaatctaggtgtatgcggatgcagacgcccccactgtcacacctctccggttacccacagtggctgatcccgttggctttcttggagcgacgcaggtccatattctatactcccggcttcatagcgcgaacagggggtgccaaaccacagggttctcagtgtcacccctatcgcgagcggtcctctgcggctcccttcccgctccggatcccaagtgggggccggctctccaggtcagacaaggctgcgttcacccttgcagcccggcagacaggatgtgaccgatcccctttccctgaactgactcctcctctggccgccctaggcagcaccgcgatccgggtgcccagcaagctcgctccctcctagcccagctcaggaaacaacccacgcctgagactccagaggcaaagtacggacgtgcagccagccctttgtttgagtgtgcctggcgcgggcctccatccccagcctcggtctctcccgcgcttgcatcccgggtccgaaggtttctcttcccgccagtgtcccgcccgggaagcagacgcgcccattgtccgcgctcaccgtggcatcctgacccgcatagtggctgatgacccgggagccccccgggtggcggcggctgaagtcgctgatgttgtacactttccggtcgatcacaagccaccgctccttctcccgcccggagtgttgcgccacctcctcccaagtaaagtagcgaggctggtggagttgggccgagcctgggaccggggtcggcaccgggtcgggagccatagcggacctggccagggaacccggagctggagaggcgcgcgctcgaggccgcgggacagcgcacgccggcctcgcgagctgggggagcggcaggctgctgagagcgcgcgcccggatcccggcgtccgcgcgcagggttttcagcaccctcggcgcggaccgcggcgcgcgctcccattggctgagccgagtggcgtggggcgcgagctccgcctctctcggccagcaccgactgacgaccccggagggatttctgaggcttccagaaaccgatacgcgccccctcgcgggtgccagaaagtggtcaccaggcgattccagttctgagcaacgtagggactgacaggataacggttcctgtgggtgtgccacagcttgctgcagctgaggtggaggacccaagtgtgcatagagaagcttggtgtgggcgtatgaaagaaaaattagtttggagacaggtttttctgtagctcaggctggccttaaactcactatgtagctgagaatgactttgaatttttctttttctttctttctttctttctttctttctttctttctttctttctcttttttttttttttttttgatttttcaagacagggtatctctgtggcttagaaggctgtcctggaactagctcttgtagaccaggctgatctccacctcacagagatctgcctgcctctgccgtctgagtgctggaattaaagacgtgcgccaccaacgcccagctatgaccttgaatttctaatcctcccgagttctgggtttaccggcacgattaccaggtcccattttatgcagtgctggagattaaccctgggcattatttatgctaaggaaaacattctatcaatctgctgctccaaggaaacgcttgacaaactaaacagctctttgagcaacaaaacagcttcctgaccccttctgggcaatgtgggcaggtagtatgtgtggacaggaaaggtgattgatgtaaagaaatagcctagttggctacagttccaggcatttgcttcacgtggatgaatttgagcactctgcagcctgaggctagcagaaggcttgccttctatgattagccaacacttttgacttaaaggaatgtagtacttgaataaccaggagatgggtcagcatgataaaggcccttgataccaagcctgaagacttgattttaattccagagacccacatggtagaaggagaaaaccagctcccacaagttggacctccaagtatgttcacacactgacaatgtggagaagcccggcttaggacggcaagaaatgaagggcaaataaagctttcttgatgacagagtgatttggagacagctatttgtgtctaaagtgcctgctgcttcagaggcatgtctgtgatcatctttatttaatggtataacagtgatacttccaagagtttggaaacccccaccctgtgtgcagtccaggacccccaactctttgtgtgtgttcccatgctcatgcacaggtatgcaagtgtgtatggaggccagaagacaacctcaggaatgctgttcatctcctttgagacaaggtctctgactagctttaagctcaccaatttggctacacatgcttggccactgattcccaaggaaccctcctacctccacctctccagtgctgagattccaagtgctttgccacgatgtctaactttttacatgggttctgtagatcaaactcaggtcctcatgtttccaaaggaaaattgaagtactttatcaagggagccatcttcccagccccaaggaatcctttggaatagagagatatgaaccccaaatttcgggctctgaagtcagtctttctctgatgttgttttcaaaaagaccctgtcttcaggtgctagattgtgccatctgaaggtctggtagccatcagttgctgagtgtcaaaagtactgcttgtactatacgctgtggcattgacatcataacgatctgtgtcatagtttatagtaattatgctatcagggtgatggctttctgcccctatttcataaatagttgtgttttcctgtaggagttgatgtgattgccatccataacactgattaaaataatccagctgactcagttagctttacggcaaaacctggtgacctgaattggatccctaggacccacataatgcaaggaggaaattgacttccacaagtttgtctcctctctctctctctctctctctctctctctctctctctctctcacacacacacacacacacacacacacacacacgtttgtgtgcacatatgtgcacacagacacacacacaaagtgatggtttgaaagaaaatggccctcaaagggagtggcactagtagaaggtgtggccttgttggagtaggtgtggtcttgttggaggaagtgtgtcactgtggaggccggctttgaggtctcatatatgctcaagccacatccagtaagtcagtacacttcctgttgcctgtaagtcaagatgtaggacacttggctacttctctatcactatgtctgactaaccaccatcatgttgcaccatgatcataatggactaaacctctgaaaatgtaagcaaccccaattaaatgtttttcctttatgagagttgccataaaaaagttgtcatgaaaacacacacacacacacacacacacacacacacacacacacacacacaaaataagtgtgattttaaaaatataaataagatgaaaatgaagaaaggccagccttgccttctttgtacacttgcatatcgttttaacacttattatttctagtgattttggttacatattatgttttgctgttttttttctgggcacagggtctctataggtagccctggctgacctggaactcaccagggtgaacattgcctctacattgcaacagtcactctgctttgacttccaaggtgctgggattataggcaggcaccacaatgctttactggtttataaattagaattatccaatctgggtgaccttaattttcaggagacattaggaagcagttagttgtgaactttgtatcatggcagcaggagcggctcttaccagcgatcgatgtgcagattggtgaatctagcaatccctatttctagaagcatgtgtttcctcatagtggtttgtcagcttggcatagaacctgttcactaacagttctatgtattgttagtctttctgtaataaggaacttacaggggcagaactccgtccctatctttgctcttgttttggctaagtgtcagagttaaattgcctatacaaatatccttcagctttagttttccattcttggtaatagtgccaagccatctggcagaagtattaattttatgtgggagttttatcttattgtccgggcaccaatatataacatggataataaaaacccagagacagatattagggttcaagctgaagatcagagaagcaaagcatcaaagccaccagagagagctcttctaccaaggtgtggcatgtaagcttgctcatattaggtcatccaggaggcagagtaagaactgttcatactcagatggctttcccctttgcctcctttattgagccaggtcatagaactgtgccacttactttcagagcaggccttccctcctggtaatcctctctggaaacaccttcacagacacacctaatggtgtgtctcctcggtgacggtgatccaatcaagttgacaaagatgaagaataagcattgttcacaaagatagtgcattaaaatactagccacaacttttcttgctgaaaaattttcatccaagttcattttacctgtaagcctacaaaggatggagacatagtttattagttaagagcacttgtgaaacactcatacaattttttaaaaaagagaacacaaactccttttactggtaagtgtttataagaaaagctgtgtatctgtatttacctcatgttgaaatttctggagatatggctgttttaactgaacaatcaacattatcacaagtaattatctgagccacacaaacttggaaagtttttggggttgttcttatgttctgaggagaatatttagaaaggcatgtttgccttaaatccaacgaaactgagctgttttctagtttaacttgacaatagttgaagaaaatagataaaaatcaaaactttcagacatataagcacacatgtaggcagatgagcagagcaggtcttctttccatttgagacagttctcactatgcagtcctggctggcctggaactggtcgggtacaccaagatggcctcatattcccagagatccgcctgcctcagcctcccaagtgctgcccccagcctagagcctacatatttaacgctcagatttcagccgtgtgttaggtacaagttccctgagctcaaattggtttctgtggcctatggaacaatgttttctgtcagggtgagctaaagaacttgaccatattcataaaaataaataaataagtaaaaagacttttatttaagatgtctttgttggctttttgtgatgcaccttttgcagaggcaatctctagttcatttagtcatttagatgctattatgcactgttaaagcccagatcccattgattttattgctttggctttctctttagttttttttttttttttttttttgcaggtcaaagcttcctcactgtgacgccttttgtcatctccctttatttatcaaccaataagacaaacatatacacagaaggacgtcccccatcatgattctaaattgtctttggtacgatagcttctccttcctttttgaggtgttactatgcagtcctggctggcctggaactcagtagctagaactcacagagatccacctgcctctgcctcctgagtgctgtcgtgtgcctctacatctggtactaactcattttttctaaatacacacattctggacctctttgttcttgtatatgaagttactcggtatctagaaaatggaattctagactcttgaatccccagacttcttagatttgaggagacctctttgccgaaactacctgagctctcttaattagagctagaagagttaattatcaggtctgatcaagtcatggatcctctccagttagaattgttcaaagatgatttgacagctcaaaacacaaatccaggagctttactggaagtagaactgacccataaccctaactaatgcagtggttcaatggccccagtgagcacctttagttggtcactgggtactcctgtggggtctactctggaagtcaactaaatcccactctgacaccagtctgttaaaagaagaagaaaagaaaacacctttagattaattaaatttatcagagtttatttttgataagaaaagatttatgaatcagagagtagtctgagccaagagagggttcagaaagctctatgcagcaaagtgggcaggtggcatttatgacagaaaaaggaggtgacatacagaaagaacctgattagttacatttgcctatgtacacggctctgggcaatctgcagcctctgattggctgaaagttcagctgatgtgattgagattctgttatttgttacaagaatatatactctcttaggttgcgtttcacagtcatggttagtactgcttctgctcactgtatacggatgtacttatttaagaggtgaagagaaagctgggcgttggtgccgcacacctttaatcccagcacttgggaggcaggggcagacggatctctgtgagttcgagaccaggaaagctgaggctggggtaggggcagagggtaaggggatgggagtgggaggctgacccctgaagctgaggtcatcccaggttcaaggctatttgtgagcagggcttctagtgaaggagggaaggcacactcagctctaagctatgaaaacttgcaccattgccaccagggctgaccctccatgaatcaaaattcttactgcctcactgtccaaagtgttgggcctgttatgctgcctaaaataattctctgacagcctttgtcaatttagtggttattgtttattgaatttggtggtggttgacaggttggtaatggcctaatttacttagcataacgttaaaaatgatccagagtttttgcaatctcgtttgtcttcatctctgcctttatatatatatatatatatatatatatatatatatatatatattgagatcctatgtaactaatgatgctagaatcccctgacctttaggcagcccaagtgaaaatcccagaactttcaagcctttgtcttctagcctggaagggccccaggagactttgcaacaaaggctaaaactctgatctctcggttttaggaagaggagtgacaacacagcctgaaggtagtgagtgggtcagtttagaagctgatgctgtcctgagaagacccagtgtggaggtgctcaattttctttgttatcatttatttatttgtgtcgtttttcagggctcttcagatctagggtcctgtaagacaagcagctctcccactgagcagatagatccccagcctcagctcctttctttagcaagcactttatgaagaattgctatggagttcttttctccacagtgaaatgtttcctcgtgaaaggactggggcaggggcttgtaaaagtcacaagaatgttcccaggtcctcagcaactcttgagtactcttccagaagaagccattgcaaagggtgtgaccctgagcccctgccacctgtgagagggtgacacaggacggctaggggaagcttggcattgtcagcatacaagagtatctgctatataccgatgagggagtagattcagaatgaggaggggacttcccaccttcccatgaggcagtccgagcatcccaactttctataaagataccgtgggcaccttacttaagaatgaaagtccctgcagccacccctctgaacagcttgtgcaataatttggcagtatgtaagagagctgtaaatcatcctgtgttcctttgatggagtaattgcactcctgggaaagtagggggtgggaggctacacatggatgcaaaaattagtacatttaataacaaaagttaggaacagccccaagttctgaccgtaagaaaatcttccattttctagatcaggtcagcacaatgagaaccaaggaacaagtttaaatggtcaggatgtgagctatgttgacaggtggaagcagagtagaaatcaaaagtgtggattccctgattacaatgattaagaggacatagtccttgattaacttttatgagttcttatcttttcttcccatgctaggggctgattgaccctcatgcactgtgtatgctaggcaagtgttcttccactgagatataccctcagcctcagttaacctttttggaaaaatagtttgactggtttatttagaaccttacaaatgtcctcagttgttctacacctagtgatgtagcctatagactacacacttttaagttattgtagagttttcgtgtaagaatatattatacattgggaaaatttcccccagccctctcgatcccttttcacatcctccctctcaattagccccctttcattccctagacagtttcacttttactttatttggtggcggggaagacagagctctccttctttgaaacaggttctctcactattgccaatttagctcaaggggcaggtcagtaagccccagggagctcctgtctccaccttcccagcactgggattccaggcagtgtgccactgtgaccaggctttttacatggtgccagagagcaaactcaggtcctcaagcttacatggcaagcattttttggagggaaccttctccctaggtcttgcttctactttccttttcacatatgccatatatgattttatgtagctatataaaatataggacccacacaaagacatgcgatatttgtctttctgagactggttaatgttctggtggaagctccacttcagcccctggcatccatatatccaaagagtctggaacttccccctccctcacgttgccccacgcctgcaggaagcagcccaacatgaaccagcatgcatatacccaaggagtctggggtgttctggtggaagttcacctcaataccactcccccatatctctccccccaaaccctgccccattctagaaagccaccaaacagggctcctcccccagagatgctcaagaccactcccacagggtatttaaactgtcccccagaaaacagatatgtggttttttttatctttcttgtccatctcctctctgggggccaggaaatcatctggtagtgctttacccattaaacccgggtcttttctaattcaatttgatttggtctgatttggattggtgcatcagcgggaaggcttatcagggtgcagaaacttttcagttaattcacttgatatgaatatctccatttgcagccattttcctgaaaagagcacagcttcattgtcctttctggccgaaacaaattccattttgtatgtatatactatgctctctttatccattcctctggcagacacctgggttggttccattccttagctgctgtcaacagcactgcagtaaacacccatgtgcaggtgtctctatgctctgttgactttaaggccttggggtcaggactcagaatggtacagccagttcatatggcagatccctttgtgtgcttggagaaaactttatgaagattgtgtgtgtgtgtgtgtgtgtgtgtgtgtgtgtgtgtgtgtgtgtgtgtaccacaatatgtgtgcgtggatcagaggacaaccttagctgtctgcctttccttccaccgtattagaaacagcatctcctgctgtttgctgactcctgctgcttactgacccagtgagtgcccaaggatcctcttgtctctgcctcccatctggacataggttctgggattacagatgcatatcaacatagctctatgcagtaggctttatgtaggtgctagggatccaagatcatgcccccacacttgcaatgaatctttcctgcagctcctctatggatattcttcttaggataacaattcatcaaaccagtatgtatgacatcaacaaaaccctagaaataccttaattactattaacttaatgttattaaagcagatattaaaatcaatatgatgaaatttcatcttaggcaagaattgttcaattgaaagaaattagaaggaaattacaggagtgactgcctggggacagggagagataatttatacagtcttcaatacattctaaattttttaaatgagtgtgttattactttttaaattggggctataaagttactctagaatgtgaaaagtaaaaccaacatagctaggagtagtggttcctgtctggcctataatcaagaagctgatgcaggaggattgctacaagttccaggccagtctgggctacactgaaattccactactaggatgatttcttacctaactccacctgccaaacactattcattgttttattcaacatttctggagtgtcgatttggttggtgtgggaacacctagtccaagactgcttgtgtccagaccaatcaagtcacagggatggggagagagggacaaacaagtcactggttgtagttcagtaatttatttcatctgtgcttctgggcatttctttgtttttttctgtgttcccttttattataattacattaaatttgatctctctctccccccccctctgtgtatgtgtataacatgcctgcagaagtcagaagacaacctgtaggaatcagtttgttccttctgccttgtgagtctctgaacttaggtggccaggcttggcggcaagtgcctttacccactgaaccatcttgccttgccaggactttactgttttggaatgtactgttttgcttacaaaaatttttaaatgtcaagcaatgcccagtgatatgtcagagcagccccttgctgtttacccaagtgcatcatttttcgtatgcctgatttaattgatattgtattgtccatcatggctttgggagtgacagtctgccacagacatacacagatgtacaactcgggctagatgtgagataggctataccatgttggttctgtggtgttcttgtgactatgggaatacccaagggcacatttcagaacacatcccccatcaagaacaacttagaactgtgttcaaaatatcctagttgggagttctacgtggaatttcacatgaatgtgtcgtgcagggttttccacccagaaaaatacagatctgtaagcatcaagttccattgcccccatcctcccacacagatagcatacaggataaatcacctttctaagcctgcctggggcctgatagatcactccattacctctggggttctgctgatcctgtgtgatttttcagtattcatgatatacatcatatgcttaattccaggttgacatttttgactactaactgttatccatgaatctgctcttcaggtaaaagactaaagctccaatgccaattagagtcaggtctcatttggctaatagaactgctaacgactattgagatagcctgggatgggtgctcaagtgttgggctgttttgatagagttgtactgtaattgctggaccattgatgcactatgctttacaaagtcgaccagcactggaggaagagagctggacgcttggccaagcccctccagcctcaaaagatcaaagtcactgtagggaagcctcaaaagatcaaagtcacttggttttctgtcaaggctgataacttgcaggcctgcactgagcacgaagtaggacttagggaaatgtttcctcagatgaacatcaagtaagatggtgattagacaacatgtcacacagtgcccagctgaggagcaatgtcacaaagacagaaccagggacaagattctttcattttcctatgttgtagaactgcaggagattgaaagggtctggtagagaaaaaaagatcacaagaacttaaccagttttcctgctattgttatacagagggttataacatggtgagagggggaccttattgggtgagggacaaaacactatgcagacagagcttacatgcatgcacgtgcgtgcgtgggaagttttattgggggaacggaaaggaattggggaaggaaagggggagagagagagagagagagagagagagagagagagagagagagagagagagcagtgggagagtgggagtgggcagagcttctctcttaaaggtgtcttttgtgcctatgtacaaagccagggtactgcctgccatgaacacagtagtgacacactgccaggtccccaagggtcaggcccaggtgtgcctggatgctaacatagagcatatataccaagaagcgggtctatggagatccaggagctggagtcagccatggaaaactggcaaatggggctgtgattcactgccagctccttcctgactttcagatcctctctgcaggagttcctagaaaccaggttcagtgtgcttttagtgcaaaacccccagttcaaagaggaggatgggtctgtcttgctgtcccagcttctctggctaccctcttgttcctagcctgtgcacctgcctctttcaaatgaaagaaaacaggtttcaggccttcagcttgctcctgggacctgatctggagtgcctcaagcttcatgaaagcattttgcaatttttttgtttgttcttttttgttttgttttgttttaagaagcggtctcactgtggagctctacttttcctggactcatagagatctaccccagagtgctgggagtaaaggctaattcctgcatccagcttttacaggtatcttagcgcaacgttgcacaggttctcagatacaaaacaaaaaaggctaacctgagtttcagaatgaggggattctttaatgtagcatgtcatcattgcatgcagcacacacttacacatacactgatacatgtactcatttagcaattaagcaatttcatcactgtgcaagcaacatagactacccttacccaactgaggcaagatagcccaatcacttgtaatagcctgtgtgctaccaagaaatgctcagataaagacttgctgcacagataagagttcagatctccaacacccacgtgaaagccaggtaaatcacttataatcccagccctaactgatgagttctgggctcagtgagagaccctgtatcagtaagtaaagtagagatgaccgaggtgtgcaggagagctgctttggcatggggttaaggtcccaaagagagtgtgtggagtcagttgggtgaggggtatggacagacacaatctgaggatgaatcaggatggctgccagcagcatttaactgagaaaacattgaaaagtttacaccttctatactgtataggtgcacataggtttaagtggaagacaaggggcatgtgagttagggagtgtatgtaaacacacacaatgtatttaactctttcctctgttgttggacctttgggtagagctttttgcttgtgtaaatattatgatgagcattttgaggtagagatgttggttgtattttgaggcattttcttgggataaattttgcatgtgtaatgtatgaatcacatgataaagattcttttttttttttttttttggcttctgttttgtgctgccaagttacttctcagcaaatttcagtgattttttttaaagcttttgcttcacattccttagtattccgaagccctgatctcctgcttcttctcaggactgtgggctctcaccgatcaggaacaaagcactgcacagtgggagggtctctggacccgtctatgatctatccaaataatcacaatagcaaatgaatatctaattctagtctaaatgtgattcgtatttggacaatgagccaccaggttccagcagaatgtggcaaagatgggattccttctgctcactgaaagcatgtccctggaagagataccggggctcggacttcttcctctgtcttccatccctagcagtgagctggacgggctacctctgcttcatgtccttaccgcatgttttactctagcaaagctccttcttctggctggtttccttttgtcacaagactaccagtgacatcagcattagggtgacctggactccatgtcacttcacaagacagctaggatggcgtttgctgccatcccacagtgaccccctctgctgctccagtgtaacctatagtttcatgactctgctttctctcccatgcttctgtttccctcctatgccaaccaggactccagagatccaaaagccctcagcttcaagggattgacataaaaatgttgagagtgatgctcttaaaataagagtgtgacaataacaataataacgtaaaaagacagagctgggaagatggctcagtcagtggggtgacctggagttctatctgcagcacatgtacaaagctgggcaatgcagtgtgcacctataatgccagcactggggaggtagacagaggaaccctgggactcgctggcagctactcttgctgaatcagtgagcgccaggttcagtgagagcccctttctcaaaaactaaagcggagcgtgattgaagaagattcccatcattaactcttggctctcacacacaaacacaattgtgcatgcataggaatacacacaggtgcacacacatgcaccaccccccatacacacaaaagggaggatgtaaatcctcataaagaacacgagaaaaaggagtcagtcacatgagtgatgctgggactaagagaatattgagccatttggggacgggactcttgcatgtctcagaatgaaggtaaacttttgacctaggccagttatgcggaaaccaccaacacactgaaatggtggctacaactggcacagcccagctaggctggaatccgctgccctccctcatgctccagggtaacagacagcttcagggctctacttcctctttgtgcttctatttctctcctacatggttcaagacttttcacctaaaagtagtgaaggttactatagcaaccaggagcaagaaccctgacattcaggtagcttgtctgggccagtcaccttcctcggaaaacaacttgtttgagttggtcataatttcttttgctgtcttcctgttcccttctctgtattttgagtcctgtacaacacgagatgcttgagaacacagtcaggtttacctgatgaaactgggttctaggatggcagtgacttaaaaccttcaaacagatgccttctattgcagtcttttgatttatagcagattagtcaatacagactgtgggctaatactttctgtatatgaatttatttaccacccccgactaagtcttcatctagaaaggctaaacacggagccctgggaaaaagaagtccttctcaggtgctatgacatctaaacttggtttttaagaactgagaagaatggaattttttgtgggtgggggagtggtaatgtggtcaagtgcttccggccaatagaggatagcccacactttcggggaggctcagattgcagcatccttctgccctgctgaatgcctcctcactcccatcctttaaactgtataagactgcttcatggctcattccttgactttgtgtcttagtcagtgttctgttgctgtgaagagaaccactaccaaggcaactcttaacaaaagaaaacatttgccaggtaatggtggtacactccttaatccccagcacttgggaggcagaggcaggcggatctctgtgagttcgagaccagcctggtctacaagagctagttccgacaggacagcctccaaaagccacagagaaaaaagaaagcatttattgggggacttgcttgattttagaggcttagtccattatcatcacaacagggagcatggtggcctacaaggcgctagagaagtagcttggagcttcacatcctgatccggagactagcagagggagaacactgggccctttggggtcttttaagtctacacccagtgacacacttcctccaacaatgccatatctcctaatcctcctcaaatagtgctgctctctggtgactaagcattcaaatatatggggtgatggaggacattcttactcaaacactacagtttgtaaagctctataaacgttcttattattgtatatttccatactttcagatctcatgatgaaaacaccaggagcctttccagctgactgtatatttacagttgtttccagtgttgtgtatttagggcctggggatagctcagttgatggaatgctgattcccatgtatgaaccccctggtctgacccccagcatgcataagctgagcatggagcccatgtttagctcttagcacttagaatgtaggagtcaagaggattagaagtttaaggtcattgttgactatttggagttccaaaccagcctgggctgcatgagatcccgtctttaaaacaaaaacagggccagtgagatggttcagccaataaaggcactaccaccaagtctggtgacctgagttcaattctgaggattcacatgtattttcaagttaacttctgatctccacatgcttgtcatggcatgaacacacacacacacacacacacacacacacacacacacacacactaaatataataataaaataaatgatcaaaaacaaacaaatgcatatatttagtttagactatttcaagggtgtttgttttgttttggtttggtttggttctgtttttcttttggagtcagagacttgctatgtatcccaggctggctttgaacttgaaatccctcctgcctcagcttcctgagtgccaggattacaagcctacacttccataccaagctcttttgagctttgatttgtgtgttcagtgccttcttgccatttttcctggtgtatcttacccaagtcacatgtccaagcctgagtttctcgtttccctgctcctaaacatactccctttctttatctttctcgtttctctcattgttagaaacactgttggcttgataagccaaaccaaagaagagcaatttttgaaatcacacgctttgattcagtaccaagtacagctagttctacatctagaaacaaatgtcacttccgtctatctgcaaggctgcactcctgctcaagctgggtcacttgtcaggttttttgctgtactttatttttatttatttatttatttattttgtgtgtgtgtgagagagagagagagagagagagagagagagagagagagacagagacagagacagagacagagacacacagagagagctgaagggagcaaatgtgtgcatatgtggaggtcagaaaatcatgagtgtcatttctcaggcgctgacctggaactagaccatgtagaccacactttaccactaagctatctccccagccattgggagatctttttgtttgtttgttttgagacagggtttctctgtatagctctggctgtcttggaactcactctgtagaccctgctggccttgatctcagagatccgcctgcctcttcctccccagtgctgggattaaaggtgtgcaccaccactgcccagacctttggagagattttttttttttttgagatctttaagacttaagtttatatcagtttcctgcttaaaatctgccactggttttcttttgcacttgaataaaatttatacccagtggtacttgtctaccttcccagctttttgagtgatctttcctctccatctagtacacagtggactttctgtctccaaattaattctccttctaccaggtaggccatagggatcaaactcaggttgccaggtttgacagcaagtgctgctgagccatttcacgggtccccaagctcattcctgagctggatttgtgtgtggctgtctgtccttccaatacatgacctgtcgcctgctcagccatctgctcccaagccaaaccacatttcagatgctccctccttgaagaccactcttcccagggaagatgtcaccccatcttcaaagaagagaggctgtcaccctccctgctgctctcctccttgctttcttcttacgggatctgaagtcatttcatcattgttttgttttcgatgtctgcataattggtcctctccctctgcagcagaactagaaacatcatgtgtgttgtgttactgttgtatctttagtatctactcaatctagttgatctgaggaatgaacaaaataactaaggcaaagataaaggaaaggccagtgagatggctcactgggtataggcccttgccaccaagcttgatgacttgaattcaatcctagagcccatgttcaaggagtgcttactcctaaaagttgttctccggtgtctccttcagtacagtgtcatgtattaggcacacacatacacaataaaaaataaaataaaaactaagaaagtaagtccaaatgggtgggccagagagttaactcagtggttaagatcttttgttgctctttcagagcacctggttcaattttcagcacccacatagtggctcacaaccatctgtaagtccattttcaggggatctgaaaccctcttctgagctctgagggcaccaggcatgcatgtgcatagacattcatgcagacaaaacacccataaacataaaatagtaacataaataaacctaaaaatttctttaaatcaaaatgagtgactacaacaggaggtcatgagaaaaaacaggagccaatagatataaatggatgctcaaactatgtctcataacttaaaaaaaatctattacacctatcagactggtaacctttacaggtttgagcctagactgggcaacaatctgccaaacgggtaatggaaggacaagtaagtgcagagcttttagagatcacacaaccatctgtcttgctttctctggctacagtgggccctgagttagcagttaggcgacatgatgcttccagctatcagtgagttatctctgaactcaaacttgtctggttaattcagtcaaatcaattgctttgggagtagggttgcttagtgggtgactgaacatccgtttcctcttggaatgcatgcatacatgcacaattgcccttctttgtgctttggtagctcccgagtgattatgccagcttggtaaataaaataagaaaacatttccttatccgatatcattcataattaataaaatagaaaacccacaaatagggccttaaaatgtactggggctgaaagagatttgttaagaggctgggaaccaggtccagatgtgggcatgtgtgcctacaaactcagcacttggaaagtagaggcagggagatcaggagtcaaggtcatcctccttggctacatagtaaattcaaagccagcccaggctacaggagaccttctctcagaagaacaaatggacaaaagaataacaacaacagaggttgcaaaaacctcccagtgggcaaagcacttgcttcacatgcatgtgaactgaggtcaacccaagaaaacaaaaacataaaggcaaatggagagaactaactctacaaaattgttctctgaaatccacgtgtatgccgtggcatgcacacccacacaatcacgtatgcacaataacaagtaaaattcacaaaacaaacaaacaaagaaacctatagtcaataagtcaggattgccaaatatgcactcatacaaaaatttcgaacaaattatgtactagactgttcaccattgtggtatttgtgagagtaaggatatcatatataagtaatagtacctcacatttttgaggacttgtcatgtccagaaagcatcctaagcattttatatacagtatctcgtgtgcttaccagagggactccgagaggcagttgctgtcatcatacatcctttcatcctggctgacatcttccccagggactcggaaccagtaagtggctgaagagctgagcagagctacatggtctaccatcatccagaacaacctaagtgtccttcaaattaggcaaaagttacataaacatggcatttgaaggtctacatgctgactaccctgctaccatacaccattgtcaaactgggcaaaggatatgaagctagggatgggcaatgtgcaccttgagaaactgtgaatctcattggaaagggagcaaagtgagtcctactgtcgccctggcttcctcctaaatgagttcaccttctgatgctgcagtgatggggaacccaagaagagcatgcaaagactggcaaaaggctcagatatctgggacttgtggatcagggtgtgagaaaggagagtgcacagagaggcatttccttggagctcttaagtcttcagtcaatgctaaacgtcaatgctctctaagcctgacagaggatagctaggggccttgctgtgctggggaatacagaaacctctgttagctggggtcaagagacctcacaatatactcttagcattcaactgcacctctagaaaaacaacaagcattaggctggtgagagggcggcgtgggtaaaggtgcttgccaccaagcttgacaacctaagtttcatccccaaggactccatggtggaaggagagaaatgactcttgcaacttgtcctctgaactccaaatgcatgctgtggtgcatgcctatccacgcacatatacacatacaaaatcactcaatcgatacatgtaattttttttaattgaggttggagaggtgggtcagcagttaagagcacttgttgctcttgaaacacacctgtggacacccgatttttggcaaagaagctggtcagactggatgctttcgctatgtcccacagaccttgacatgttgtcttttcatcaacattcagctgagaaataggtttcgagtcagtgaggtggctgagataataagggacatttgtagccaagccagaaacccgagtctgatctctaggagccacatggtgtgggtagaaaactcattcccacaaattgtcctgtgacttccacacacacatcaccgtacacgtgcacccccccccatacacacacaaaataaataaataagtacacttctgttttgttttgttttttttaataagttgccgcaatgatagaggaagacgtccaatacaaacttctggcttccgtgtacccatgcacgtgtacacatatgcacacccacacaaaacaaaaagatatggggaagtagactttatgtcaagaacatgaaattgaaaaccaatcagtagttattcaatacattaatgtgacaaaggacaaataccatgggactatctcataattcattcaggagaagcaattcgcaacttcatcctgagaactcccaccacacaggagaagggacagccctgagcctgacaaatatctgtgaacagccttcagtcatgtcatattgctgacctctgcagcttctgaagggaattaaaaacacctcaccaagacctttaagatcctgagtgacctgactgccgtttacccccctatacacacacctcctgtctgtcagcagatcccctgctgactgcacatccccgctgccatactgtcttgctgtgcttctcattttgtctttcttctggctccttcttaacattagcgatcagcttaaataaatacccttgtttcagagaggccattgacaaggagagaatgccctcgatccatcagaggccgggatctcactctgggttcctaactgatgcagccagtgataccggacttgtgaggtgggatctgacccaagcccagctgcccatttaacttggcttccaacctgctccctgatccctcagtccaagaaaagtcctgtcagaatgaagaaggaagccaattcctgcctccatcactcactgctttttaaaactcaggcttacatcaccaagtgggaccagcagccctgcgtacttccatttaagggcagctttataaataccaagctctgctgtttcttagctgtgcttaccataggcaaaactacacgttcatcgggggaagatgaactggatcttggtttccaactttctcacaatgcccagttccctgtcactttttataactccatttttctttcttcatagcctttgaatctcagctaggatacaaccatggggctggggaatgtagctcagtggtagagtgcttgcttagactctgaagccctggattcaatggccagtgttgccaaagaaaatttacagagtaaaatctgagaactatgggatccagaagtttttctttctaggactagctgtacttccagcctgtagaacagtgcttgttgtacaacagatactcagtaaatacttgctaaatggatgggtgtgttctgtagcttaacaatctcttggtttttcagcaacctaagctaaagcctaattccttagaatagtttgctagaccctttcctcatgtgtcaacactccctcctcctcctagtccttccgttcctcttgacagagtcccatttatcccagatttcatccctctacaacccctgctggcctcaaagttgatctgtaactgaggatgtctttgaacttctgatcctcctgcctttacctcccgagtgctgggagacacaactggtttatgagatgcagagaattgaactgagggctgtgtgcaagctgggcaagtgctctaccaactgggctccatcccccgttgacccttcttgcctggcagtttcccttcctcttccccagccttgtagctgattctgcactccagacttctgacattctttcagatccccaaagctcccaaggtctctctgatttctgtgctcttggtcacctcttgactctcttgtgggagcattttcagcaccctcatttttcatcctccggtccacgccatcttccagcttgtcttacccctccacatccctgcttctccttgacactcaggcctctgccccaccaaaatccctgtcgtgcaaacactgctatgcattagttgcctccttttctgactcccagagacacacagagatcctcaagagcagacccgagtctaataaaagcagttatttctgtgtggctagactaagtgtattttttaaaaataatttggctcgtatatattttctggttttgaaaacatctctgtttttctacaaacaaaaaatttggctagacttattttttaataatttggctcatatattttctggttttgaaaacatctctggttttctataaacaaaaaataataacttgacttcaagcttccaatgaagttgcaggaatcaagatacacaaataggtcagtgaaagagaatacagagccctggaacacccatacaaacatggtcatctagtctttgacagaagagcccaggcagtacaacagaggaaggctaatcttctcaacaaatgctgacataaaaactagacttccgggctggagagatggctcagaggttaagaacaccaactgctcttccagaggtcctgagttcaattcccagcaaccacatggtggctcacaaccatcccttatgagatctggtgccctcttctggtgtgcagatatacatggaagcagaatgttgtatacatacataataataataaataaataaaatgttaaaaaaactggacttccatatgaaaaaataaacgaggtcaagctcttaagtcttttagaaaaattgaatcaaaatggattaaagacaaatatataaaacactaaactgtaggactcctggaagttaacacgagaacaggttgacctttttgttttgtttttttgagacagggtttctctgtgtagccctggatatcctataactcactctgtagaccaggacggccttgaacacacagagatttgcctgcctctgcctcctgagtgcttgggttaaaggcatgtgccaccactaccaacaagcagcctgacctttttgatacaatgatattgagtcacaaaacaattgacagaattggactttattaaaatttaaacttcaggatggccatggtggtacatgtctgtaatcctagccctcaagagcctgaggcaggaggatcatgagtacaaaatcaggcttgactttgttggatactgaaactatctccagaaaataaaaccagaattatcctgttctgtgaaggacactattgagagaaagggagaacacgccacagacatgtaagctggtggggctagagagatggttcagtgggtaagagcacttcctgcaaaaatatgagggccaaagttcagatcccagatcccacataaagagccaggcatgaagccaggcagttgcggaacatacctttaatcccagcacttgggaggcagaggcaggtggatatctgtgagcttgaagccaacctggtctgcagagggagttccaggacagccagagccaaacagtgagacccccgtctcagaacctgtccccccaataagatccaggcatgggggcagaggtacctgagattccatctcaaaaaacaaggtagcagacaaccagtgctgacctctgaccttccacacacatgtacccccatgtacgaatgaatgtccgtgttcatgtacacacacaaaatggggagttaaactagactgaggttatcatggagaagtaagaaatggaaatcaatgtagcagggccacctcttcattttgtcaaacatactaagtactgtaccatctactatcaataatttatcataaaactattttagattttaaaatgaaaggcaaatacttaaacttaatgctttaacctcaaggaaaaatttttttctttaaaaatttttaagttacaatttatttatttattatgagtaggtattctatgacattggaagataatttagggaatcagttccctccttccaccatcatggatccaacacaaggtcaccaggcttgtcattaggtgacattacccaatgaaccaccttgccagcctgcgttctcttgtttttatttctccaatttgtctgttagctgcgcagaacacatctagtttatagtctgggacatggggatgagtagatcatgtctaaagtctcttctattccttcatattctgggctgcattagtcagctttctatccctagaacaaaatcctgggggccatcacgggaaaagaaagaaagttttgctttggctcagcttcaggcatttcaggcctggttgtttggccctgttgtcttggctcctgcggtaaggcagatcatggcaggaggcacgtggtgggggaggctggtaaacagggaaaaagaaggagaggaagtgctgaggtcccaatacccacctctaacgataagtctttccaccaactgcccaagccctgccaccatgtaggtgcctaacataacacaagagacttatatgaagtacaatgctgctggccaatgactaggatttcttacttgctagttcagtcttaagtatcaaccataaccacagagaagagaggaggagaaagtgagctatttcctgcttgtccctgcttatattctgagtctgtctgatatgtcacttcctgcctggatcacaagacttcttttcactacatttcccagaatcctcctcgactcctagtcccacttatcttgctctcctattggccaacagtactttattcaacaaccaataggataaacatacacagaaggacttccccatcatctcctcttttctgtctaaataaaaagaagggttttaacattaacatagtcaaatatataacaaaacaattatcaagtaaaactatagttataatatttagttcattatcatttagtaagatttaaagaaaatattctatcatctatcctatatttgtgagcttgaggtcttatatgtagcttagcttatcttttataataactaaagaaaactataaccataactatttgtcttcagctccatcaaagaccacagaaggataatatataaactctagatctgatagagacatctcactgcctggacagttcctctgtaacattggggcatccatcttcagcctataggccacagtgtgtctggcagacttctccatgaagctagaccccttcagtactgtcttgtttcgcaagttcagcagtcactttcctgtgggtcctgcatgtccagtttatcaaacagtccaggcaagagcagtttcttgcccaaatggctaatcttgccatgttgaaggcaaactccatattgagtttctttgatgcccatcctcctttctgatgcaattggtgtgccaggagcagttgtgtctcactgtcatgaaaaatcctaaaccatttaaatgccatatattctgtaggtctttgaaaggtctgaagaatatctatccgtctcaaaaacatctttgtatatctagaaaacctaactaacctaactgtaagtattgactataatacctgactatatacaatctgtatttaattatgcattacattttaaaagatctatataaacacaatacctaagcaagaggagaaatatacatatcacaaaattgaccttaaagttgtatcaataaatgaaaatccatatcaatgctaagtattcatatccatatcctattctccttttttcctttaaaaaagattgactgtgatattaccatttataaccaaccccatttaaatgaaaacaaacatttataaacaatatttatatgtataaagcacatgccacagcacatgagtggaggccaagggacttgtgagagtcagttttctaccatgtgtgatctgggatttgaaaataggtcatcaggtgtggcagcgagtgtctttatcctctgaactatctttccaacccccctcccgccccaaatattcttttgaaggcatacctctagtgaccaaacttccttccactatgccccaccttctaaaggttctagcttctcttaatagtgccaaattctcagcacagtatttttgggatgcttatctaaatagcagagactttatgtgcaagtgactttccactgctgaggactgaacccaggagtttatgcatggttttgtgtggcagaagagcccacagtagctctaagaaaaactgccttcagcactgagcacttgctgaagatgctaggcgcactctgaacccctgtaacagtcctagcaggtaggtggagtggatgacaaaacttgtcatcaggcttgggaaggtgacatcacacaatcgtgacaggaaccccaggacacagacccaggccctctaaaacccattttccacacccctgcccgggattccagtctgtgcctggcatctgctcttctgaaagcatcctcctcctctgctgaaaactctaacttgtgggtggatgtctaccctggccagcttccgggccacagatgggatgtcttgaggaaggcagcactagttagagcctcttcttgggcggccagagttcatgttccagagggattagaagtgagtgggagaaggctgaggctcagcaattcttcagcgatccatcccccagaaactggtcagcagggagagagaatgaatggcctcaaggagaagcagaaagaaaggaaggacaggcaggttcctgaaaccgattgctgttgaggtctcctcttctcgcacctcccccacaatcaaattgctcaacctttcctttcttctaagtccactcaaattttatcaaaggctgggggcagggatgagcgtgggggagcgagggcagacacacacagacctgagcgttgcagtataccgcaataaacgaacaagaactccagtcagaccccaacaggaagtgagggaaacaatgcctggatcttacaagtttgtgaactctcgagcactttcatcagccacagccgagtggaccagagactgggccgctgtctcaaacactaaatactacactgagctttcattgttttagaggacataggtcttctgtcgttctgagaaaaggaactgaacaagaagcccatacattcatgttgcagttgttgttttctgaagtatagcaagtgtgacttatgaactgaaactaccatttttttttctataagtcatgttttataacattcactaattattttaactttattcttttagattttatttattcatttattatgtatacaacattctgcttccatgtataactgcacatcagaagagggcaccagatctcataagggatggttgtgagccaccacgtggttgctgggaattgaactcaggacctctggaagagcagtcggtgctcttaacctctgagccatctctccagcccctaactttattatttttttttttagagtagaatcatttatgtggtttaaaaggaacagaaaggctaggcatggaggttcacacctactgtcttggcacttgggaggtaaaagcgacaagatcaggagtttatggttatccttagcttcatagtgagctagaggccagcctgggctacacacacacacacacacacacacacacacacacacacacacacacagagagagagagagagagagagagagaaacagagagagagaaacacacagagagaaacagagagagaaacagagagagagaaacagagagagacagagagagagacagagagagacacacagagagagagacagaaagaggcacacacaccaagcaatacagtggggaaaaaaaccctaattcttgctattaacctaaaattcctaccttcagaaaactatgtagacaattaacaaaatctttgcagagatattctctctctctctctctctctctctctctctctctctctctctgtgtgtgtgtgtgtgtgtgtatgtgtgtgtctgtatgatgacttttgtaggacataatggctgatagcaacaagcatttgtatttgctcaagatcagttgggacagtttagaagttttgttcggtggagactgggtagtctaggatggcctgggatagtctgaccacatgtctgaaactagttggactatgggatcctcacttgtctggaggttggcttaagtggggtgattgccacacatttcccagaaggcaccccagtctcaagtggtggtagaggagcagccagcaataagaaaggctgtactccaatgcacaatcaattccacacctctgctttcatcgtcattgctaagaaaactttggtcaaagcaaatcatgtggccaattcaggtttaggcagcagagaaatagattgtatgtctcaatggagagttgtacagtaacctgtaaaagggggtaggaaacttacagaaacaagaaggaatttgtagcatttaagatgattctaggtttgggctggagaggcggctcagcagtttagagcacaggctacttttccagaggatctgagttcaattcccagcacccacatggaggctcacaaccatctgtaactctgattccaggagatccaacacctttttctggcctctgtgggcactgtatgcgtgtgatgcccaaacatacataagttaaaataatttttatttaatttattattgttgtattgtgtatgcatgatgtgtgtgtgtggaggcactaatgtgccatggtacacgtgtggaagtcagagtacaacttttatgtaatcaatcatttccttgtacctttgtgtaagatgtagagattgaactaggtctgaggacacagaaaatgtgtttacctgctgagggatctttctagcacctggtgtttttgttttcttcaatcaaccatatcatgtgtttgtgaaagctctctcttcctctctccctccctctctctccctctccctctctctctctctttctctctctctttctctctctctctaaatagcagagactttatgtgcaagtgactttccactgctgaggactgaacccaggagtttatgcatggttttgtgtggcagaagagcccacagtagctctaagaaaaactgccttcagcactgagcacttgctgaagatgctaggcgcactctgaacccctgtaacagtcctagcaggtaggtggagtggatgacaaaacttgtcatcaggcttgggaaggtgacatcacacaatcgtgacaggaaccccaggacacagacccaggccctctaaaacccattttccacacacaaatgccatcataaggcctctggcttttacaggcatttacaaacttgttttgaaagctgtgatctctatcatagcatgcatattagattagtcaagcaatttcacaaaagagttcttacctccttatgtcaacacaaggaagatgaaattgaggaaaatccttcagctaacaacagggttagagagcaggtggaggacagaaaatggacagctcacttttacctggaccatcattgcccaaactgattcattagctcgttaaaaatcttcatctaggggctggagagatggtttggcagttaagagcacaggttgttcttgaggaggacccagattcagttcccaacaccgacatggtggttcaaaatcatccataacttcagttccagggaatctggtgacctcttctgacctcaatgaacaccaggcgcgcatgtggtacacagacacacatgcaggcaaaacagttatacaagtaaaataaacaagtaaaaacccttcatacacttctctgaggttgaaaaggagaggcagtttcccacagaagcaccccacaatcagattgagaatttgcatcagagtgtgtagtgctgggaaccaaacccatggcattgtgcctgctggacaagtactacatggctgaacgatgcctgcatttaattacatccaaccccctttctgaaaggcgactcactgctcactttccttttgtcaaagaggatgctggtattgttctcctccaggttgtggtgtcaccttggcagtgagggtgtttcccccagaatgaaggatactcagcctcatttccaggctttgaatacatttcttttgcttgtgtgtgcacatgtgaatgtgatggatgcacatgttcttgtggatgtgtgcaagtgtgtgtatgtgcgtgtccatacatgtagatgccagaggtcaacagcaggtgccttcctccatcacttcccaccttacttttaagttcaaatatgttatatatttattagcatgcgatgtgtgcacaggcaagcacctgtcactgtgtgtatgtggaagttaaaggatacctcttgggggtcagcgccctccttccactgtgagatctggggaatcgaacttgggttatcaggcttgtgcagcaagcacatttacttactgagccatctctcaaaactcttatttttcaagatggtgtttctcactgaatctggagcttgaagatttaaagagtcgtctagactgaccagtcagcaaggcccagggcctcctgtctgcacctccccagcactgagattccacttacatgctacacctggcagtatctgaggtagatactggggtcaaactcagatcctcaagcttgtgtgggaatcacttcactgaccgagccatctctctagcctgtttatgtctcctcaaagaacccaatggagtgattggtgacagccagacatgagagcctcgcagatagcctatgtccttttgtctcaaagcaacatgagttacctcacctgctctcctccttcgccaaggcttagtcttctctgaaagtcctggtatgattccctaaagcaagaaccaagatgtgtaagcagacccctgtcctgtcctctgtctgtctgtaccaacagtggaatttgattttctaatgtgctctgaataagatccatggaattcagtcacatcaacatatgtgaatatattttgaaataaacttttcaaagacagtcgtcccccctctgacagcaatacaaactgggccccacaaatcagagcctggggtttatgactcacttgtcaacaatttccagagacagattattggggggaaattaacaggaaggttcttgtcctagatatccaaagccggggttgtcttagcaacagtctcagccttgggaacttggcagagaagggcagaggagccacggtgcctgcctggtaaaggagaaggccttgagtttctcacttctttaattcaagataaaaaaaaatgcctgttacataaaggtcagggttgaaaagtgtacaactcagagattctggctggatccatggtgttgtgtaacctctgtgtggttcctaagcatctgggtcacttcaaaaggaaactccttacccaaggatcagtcgtgctccatcctccccaaccccctaaagaagtcaagtggcagagtttctgagtgtttcaagggctctgaggcaagaacctccagtcagacaggttgagacccaaggtatccttgtcatttatctgtgtgacccttagctcatcgcttgatctcttgtaatctcaaattagcattctaactatttcatgttcagtttggaaatatcgggtgttggggagtcttgcttaagaattaaagttctgtgggtgagatggctcatacctttaatgctggcactcagaagtcagaggcaggcagatctctgagttctaagccaccctgatctacagagtgagttctagactagtcagatacatacattgagaccctgtctcaaaagtaaatacatgaacaaatatttaattaaagctcagcctagtaaattaattacaagcccagcttgtaatcctactactcaggaagatgaggcaggaggatcatggatttgaggccagtctaggcaccaaagtaaaaccctgtttccccaaagtccaaaagaaggctctggttttggaactgtaagtgggtagttctttattctctagggccttccattccccctctttccttcagttctttccttcttctttcttcccttccctttcccttccctccccacctctccccttcccttcttccttttttgagacaggttctccctatgttgtaccgcctggtttcaaactcctgcctctgcctcccaaatgctatgatcagtcaggtgccaccatgtttggcttctctgaacttctggaagtctctgagaaaaatatacaaggtcctgatgtccctccactagtctgtagcaataaaagaactttgggacataggtttaaacctgtttcaggacattagccattacctctaattctaatcacaatgcataactcacagacacttgaaagaaagtgaatgaaagaaacatcacccactcacccactcaggccattctagagatgtgtctgggggtgactcagaggtcacagctgtcaatagttggacaccaaagcctccccaaagagcagtgggaatagcttttgggggttagcaagcatattgcctattaggatctctgtaagtaactgtctcttagactcttacccataagcaccagatggccagggagaatgagcaaggactccccacatgggccccattcatcctgtggctctaagaagaaagaagaggggggcagagacccaaatctcatccattcctaaagcaatactcatttctctagaagcctgtttagagcagacagagccagagcaaggcatggacagtcctactcactaacagcaatcctagacagagtttttggggtttgctttgcttttttttcttctgatacccactaatcatcatggtgcctacctcctttctgatctccagtgttggttcttgaggaggcgtccagagttggagatgacacctctcttcggatctattcattctgcaatgcagagagtcactggcctttttgaaccacacagctagtgaaatggggaagcctcattcagtcttctgtgtaaagagccatcagagggttgtggttgacctggcagaaaatagcaggaaggccattcctgaattttaagaagattccagggatccctagaataaggggaagtctaaagctcatgctctaccagagctagcctagtcaaccgcattaccccctctatgacccctaaaggccctagcgattccagcaaatcctgaggtctgaatacctcaatgctgttctgagccagcattttagcaatggttcctgctcccccccaagcccagataccactcatagataaggcaggtttcatcaggtcggttctggctcactgacccttggaccaggtagttttgctctcaggagttcaaaaagtccttagtttcttcctgtgactcagcactgttccaaagggtcctggagaagagccaggtctgcacccaccctgaggtgcttcagggcttgccagggctttgccactaggccttctctctggggtcatctgaaggtctgcccaccccccagccagggagtgcacactctgtccttagacttaagaggttcatggttgctatggggggggtctttcaaatccaccccagatggctgctggttagttgtcaacttgactatcaacttgacacagcctagaataacatagagagtcttaatgaggaattatgtagatcaggttggcctgcaggcatgtctagggggactgtcttaattgttactggaggtaggaagacccacctggattgtggactacaccaaatcatgggcagagtcctgatctgtgtaagagagaggaaagctggctgagaataagccacaagtaagtaagcaacaagaatgagctccactcccctgctcttgactatggacaggatgcttaaatttctttggagtgtcttatcacagcaatggaaatgaaacaactatagctggtgagggtaaaatcctattgtgattggctgaacacgagagtcttgtgcacattagggtgggattggaagcccaaagaccacacaattgctgtgtttctcagacctgagaccatagtgaaggctttccatctcactggcagtggctcttcacactacacaatgagtaggtctggagggtggtgttattcccaacactgggcccctccccaagccttgggaccatctccagagatcagaaaagagttaggagccctgatgactgatgggttccagtttgttcacttgttcagaaaaatggcctaggatttctgctagggagcgacctctttctgtgtatctcaatctctgtctctctcctctacaggggtttctagaaaattagctctgccagggtcacccagggataggtgggaataccattgttttctttaagatttactttcatgtgtgttgtgagtgttttgcctgcatgtgtgtctgtgttcatgcagtgttcatgcaggggaggtcagaagagggcgttagatcccctggaactggaattacagatggttgtgagccaccatcagagtgctgggaactgaacttgggtcctttgcaagaacaacgagtgcttttaactaccaagctgtctctctagcactctttttttgttttgttttgtttgtttgttttttaaagacatttttttgcggtgtttgtgtgcttggtgtgtgggcatgcgtatatgcatgcttgcttgtatatgggtgcatgcatgtgcttggtctacatgtgtgcacgagcctatgaatgttggaggctggtgcctgcagtcttcttgattgctctcctcttcttcattgaggcagggtctctcatttgaaccagagctagctgacaaacctaggctagctaggcagcttactcccaaactctgccttctaagcactggagttacaggcaggcaccatgccacttgtccgtccttttgattctcacttttgtgcagctagcactttacccacccagccatttccagcctctcatgaactccagatcctcccatctccacctgcaagtactgggaccataggcatatgccaccatcctctgtttatatactattggggactgaactcagggccatatgcaaatgaggcaagcactctgctgtttctgggatggcttgtttggtaagaagagaacaagcaataataaagaagccaaacaaggccatagtcatggtaaccgtgggcaaggatttgtgcttcattctgggttttctggcacaaagggacccacataagctcgccacaaaggataccttggatgtagagtgacagtggctggatgcatcagatgcatagagaaagcaatggtggcttctgctttccatagtcatcttggccagaagggagggggtgctggggcaggcagagaggacgctatggtttaggttttagtatttgaagggcatatggtattcagtagagctgtccaggcaacaacagctggagagagaactctgggcagagactgtggggcagagggccaaacaagggaattggagagtgagaaggaaatcttgggacaagttcccaggcagtgtccacagtgagaaggagccagcccagaggaagaacagactggagacaaagaatcatggcagctattgttaaaggacaaggaggatatgaacaagtgtcgaaagcttcttagaggactgtgagatggttctgtgggcacttaccaccaagcctgaccttaatttcattcctgagacctacatagcaggaagagaaccaactcctgcaagtatttccttcagcctccacctatgtgtcacacacacacacacacacacacacacacacaataaataagtgaatgtcagaaattttcttttaaaaaatgctccttagagactgtgaacagtgtctactggattttgtaataaggggccactgcaatccttccttccttccttccttccttccttccttccttccttccttccttccttccttcattcattccttcttcctttcctttctttttaagaaaattttatgtgcattggtattttgcctacatatatatgtctgtgtgagagcgtcaagtgccctggaactggagttacagacagctgtgatctgccatgtgggtgctgggaattaaacccagggcagccagtgctcttaaccactgagccatctctccagtccttccttccttccttccttccttccttccttttcaccctccctccctccctccctccctctttccctcctccctcccttcctcccttccttccttttcttcttcctgtgggtggtttggaatatggcacccagggtctcatgctctttaccacagagctctacccagccctccattaccatcatcttagtgacctgtgaactgaggatgtggagggaaacttcttggatatttgactctgacaggaactccagggcatcgatttgtggcagactacagatgcacagactttctgaatgtccatatgtttataggagtgatcatagtgagcccaggaggctgaccattccctatggaggaggtttaaatatttttcattatgctctgtgctggatagttttatgttagttcgacacaagctagagttatctgaaaatgcctccataagacacagctgtaggatatcttcttaattcatgattgatgggggaggacccagcccattgtgagtagtgtcatccctggcctggtggttctgggttctataagaaagcaggctgagcaagctaaggagagcaaaccagtaagcagtgtccctccatggcctctgtatcagctcctacctccaggttcctgccctgtttgaattcctgtcctgacttccttcaataatgaacaatactgtggaagcataagctgaataaatgcttccctttttaagttttttcatttatggtgtttcatcacaacaacagaaacctaaccaagacatggctccaataacagagtagcttctacatacatcccttgggcctttgtcctgtcactctcttgggattaatttactagaaggaaagtgactgggtcaaatactatatatactttaaatttatttatctattatcaaatctcctcctttgactggtttagacagctgttaagtggtagtggaatccttgcagtctctgaatattatcctttgtttgtgtacatgtatgcatgtatttatgatatatgtgtacatgtatgagtgtgagcaaacatatgtgaatgccatgatgcaccttgcaggtcagaggacaacctctgctgtcagttcctcatcctcttgttattcattcatgggtactcccggctagctggctggcgagcttctggggcatctcttgtctctgcctccagtctgggagtgcagacataagcatgtagctttacacaggctctggatatttgaactctggtcctcacacttgtacaataagtgctttatccactgagccaactcctcatcccaattattatccatttttaagaggatggtcagtgtaaatgaccaaatacatttctctgttgttttatggagttctccaccctcatccatgaaggacacattctgtggtccccagtggatgctctggaagccgtagatggtaccagacaccacatagggtatgtttgtttcccctacatatgcatcttgacaagcctcagtgagaattaggcaccgtaagagagatggctcagtgggtttaaagcactttgtgctctctgagaggaccttggtttgattccctgcacccactttaggtgtctcacaatagcctgtaattctagatccaggagatccaagtccttcttctggcttttgtgggcagcacacacatttgtgggcacacacacacacacacacacacacatacacacacacacacacacacaaataaataaataaaaattaaaacagaacaattagacatcatgctaattcacagtaataaaagtgaatatgcaaatatagtctctcagcgtttctgattgtattgccacatcttcttgtgacattgtgatatggcacaatgactctgtaatgagagtcactcaattgatgaaatctactgaatcagtgacagaacatcaggttactctgtgagggtcatttgtttagtggatacaggatggatggtgtggtcagagaagtgactcacatcctgggtgggactgaatggcccagatgtgagatgtcatttggctactcagcatttaaaacatgtaacttctttgttcctagaatttctgtttcatatttttggattgtgcttgagcaagataacagaagctgtggaaggatgcgcttggacgtagctgccatcctgcagggctttgcttactcaggacagcaggtatgtttgcatgacttttactcctatttcttgagtcacctgctcatagtcccttcatctttctctcgggatgagcgtcttgttcactatctcataagaactctttactaagcgttaatgtaacacattttcatcttctcattatttgtcattgagtttcattatgatggttttcattttgtaaatttattattattattatcatcattattattgtgtgtgtgggtgaggagcatgtgtcacaatggttatgtggaggtcagaggacaactttgtggagttggctctctctttccaccttgaagagggtgccaatgatcaaactcaggtcaccagtcttgcttggcaagtttctttaccactgggtcatcttgctggctccttttatgttattttccacaccaggtgttctctctttcattctctgtatgtttctgtctctcctgtttttgaggcagggcctcactatgaggtttagtcctaaacgctgctccacctgtctctgtgttacactttacacttagtacagggttcttgtgcattagtggaatgacacactcatcccagcagacagcttaagggggctgtcaggagtaaccaaagccaggcagcactgtggccatgtctcttacagctgtgaggtgacaagagtgtgccactgcacctggacgtcccctttcttctcttaaaccacagttctcttcttttcaagcctaattggaatccatgtttttttacagactaaagaaaaaagtcagattactttgtcctcatgagtactttcccgggtgagcagatagaccttcggtgttcttcctggacgtggctggatcacctctatatggcagactggcataaacccagatcattcatccatcagggagaagtcccagcactgaaccatttctaattcttccatgaaagttctcagaaatcctaaattgtcctcatccacccccagaaaggcctacctctccatgaaccccttgcttcgaatcccacttacattgtatagctcctgtgtgtgtgtgtgtgtgtgtgtgtgtgtatttgctagtttctgttgttgtaataaaatacctgaagggcaggtaaatttgtaataaaaggtttgtttggcacaattttagatactgaaagtctaataggatttcataggctctggtaaagactcccccacttgactgtgtctcctcatggttggtagcaatggtggaaacatgttgcaggaaaagacatcatgtctcaaaaaaagaaatcggagagcaaccaggggtcacactcagctctatgtaacaacttcccccagaacagtatttcctgcttgaggctgcacccctaacccccaggaccaccctactgaggccagctaccaaatctttctgatgtcttagttatttctcaattgctatgacaaaacactacaaacaagacaacttatagaagaaagagtttatttggatcttacagtttcagagggtgagtccatgaccatcatggcggggagcatggcagcaggcaggcatggaactggagcagtggctgagagtttgcatccttaccaataaacaggaagcagaaagaaagaactaactgggaatagtgtgggcttttgaaacctcagagcccactccagtgacacaactctgtcaaagccatacctaatcctttccaagcagttctgccaacttcagacctagcattcaaatgctgtgaaataatccttttgtacactgtgaaaatgtattgctctcattgttaataaaaagctgattggctgatagataaggcaggatgggggggcagagagaacgttgggaagaagagggatggaagaagagggttgcaagcagacgtggaaggagcaacatgggaagttcatagatgaggaaggtaaactgtccataaggatggctccacttcttcttgactaaaggtcagagagttcaaaactgtccttagtaagtcataagacctaaaggtcaaaggcatggctacagtaggatgcttgatcttggccttgggtgtttgtggttgtcctgacccccaaggccagataacgagaaatttcagtgattactgaatccttgcagaattgagaaagaaaagtctgcttgttctgtatacgtgataccatgttccccattttggttaagatacttaaaaatagtgaataataaacttgtggcattcattattgactgaattgccctgttgatattattctatgtctccgtcttttcctttattgtctttaactaacctttcttaatccacactccccctctcaggtatgaaccatgggctggtcggctggttctgactgaatccccgcaaagacagcttcccacagtaaatgagccttgggacagtacatagatgaatagaaatgggttaatttaatttataaaagctagttaaagacaggcctgagctattggccaagcatttataattaatattaaatctctgtgtggttgtttaggagcagttgctgggacacagaaaaactctacctgcattcaaatatatgagcctaggcaggggcattcttattcaagctaccacaggtgaggatcaagtgtctagcacccagacctttggacaatgcaccacatcttaaccatggtattctacagtatcataattaatgaaagaggcagtgatttcatgttctttttactctgtaactacttgggaagtgataggagttgcctgttaagcccctgtgaccgcttggtatttcttggtggctttcctttcacctttcccttagccttctgtgacctcaatgtttgaattacagatgagattagatggggccagaaattgtgatgcctttgctgaagggacatgatgtaggagattagtgtgggacaagaagggtttcattttccttgttacaaaaatctccaaaaggagtagagaaaaatagtttgctgagtctcctgcactcatgacccagatcgcacagttccaaactcatggcagttccatgtcacccacacttcacccgtgtctcctctgctgtatcttggagcatttatttttgagactatttcattgtgtagcttataaagatgtgaaccattattaaacctaaaaaagaacccctaaacctaaaaaatagtcatcaaagtatattcaacatagaatgagtaggggctggagaactgcttcagtgggtaaaagtgcttgctaagcaagaataaggacctgagttcaaatcccaaatccgtgttttgttttattagccatgagaattgctagggcttgctggttgtcagcccagctccatgttaggtaagagattgatgtcagtggaatgaggcagagaatgatagagcagagcacattttcttctggcctctacgcatgtgcacatgcatttgtgcacacgcacgcgcacacaccacacacacacaaacatgtgcaaacacacactatgtatgagtaggaatgtctgtaagacttctgttgtttagttttgttctgtttcgagacagtctcagttgaaaggttcaggctttaatgctgatcggctctacctctttaagagacagaccccgccccctgacaacagtcagggcatgcacagggatgtgccatcaccacatcacccaccatgcatttacagcctacgtgaggactctgggcatgcgtggaacctcagtgctcatgcgcagtcttccctttaaaagttccaacttccctgcttcgcgctctctctgcttcttcttcactctctctgcttcttctttgatctgctcttctcccacctacgtgctttctctgcctctctatggcgaccggccatggcgatcagctattaaccctgtttctcttctctcttagtctccctactctgtcgggccttataataaactagttaacatgtctcatccgcctcttcctctttttctttatatctaatttaaacaaaaacataacatcagtacatagcccagactttattctgaggctacaaatctcctgctttcagcttgaatggtgggattattgcacatgaacaccgttgcccgggtggaaggtgttctctaactctgatttgctgtgcctaaccccagccagatggctaacctcccatacatttggcattattaactgtagcaacaggcacactgaatatgtgggttggtgggcaggactgggaacaaggtgcccacattctatggccttgtgcatctaggccattgggaaatctaatgcataagtctatttctctgcagagttgagaccttcagttgcccaaggggtttgatctgtgtccttcctaccctgaaagcctgctgcttgactgtctgccccagcctgcttccagctctgaccaggtacacattctttctttctttctttctttctttctttctttctttctttcttttttttttgttttgttttttcgagacagggtttctctgtgtagctttggaacctatcctggcactcgctctggagaccaggctggtctctaactcacagagatccacctgcctctgcctcccgagtgctgggattaaaggcgtgcgccaccaacgcccggcacattctttcttatttaggtgcaattttcccatccatgtggtatgtagggcccaagagaagtcctaaaggatgccacaaacaaaggttttgtgccagaagaggctcgtggcacagagctctcactggtggtgttttttttttttttttttttttttttttgttctttagacaaggtcttatatatcacaggcgagtcttagacttactatctagtcaaacatgatcttgaacttctgatcctcctgcctctacccccagagtgttggaattacaggcatgtgccatcaggcctggcttatgaggtgttgaggattgaacccagggctttgtgaacactaggcaagccactaggcaagtacccagccctgattctgatttttaaaagcaaatcccacttctatattgtaatttttaaaatctcttttcaggctgcgtcacgtgatagaatgttaatattagtctaaagaaaaaaaagaaacataaatgtttccctcaagttaatggcaatagtcatcttaacagagattcattttctttcttcttcttcttttttttttttttttttttggtttttcgagactgtgtagctttggagtggcactcactctggagaccaggctggccttgaactcacagagatccaccagcctctgcctcccgagattcattttctaaaaaaaacacattatagtcaggcagtggtggcacactcctttaatcccaggacttgggaggcagaggcaggtgcatctctgagtttggggccagtcaggtctactaagtgagttgggacagccagggttacacagagaaaccctgtctcaaacaacaacaacaacaacaacaacaaaaccccacacattatatcataaactctcaaagcatatttatctgtgcaattgtccactttttgctattgtgtcagggtacttgaggctgggtaacacaggaataaagatgtcgttcttacagttgtggaggctgtgtgaagcctctttaattccatttatgagagaggaattcacagtttcatttcccctctcccaatgctttcacattaattattgagttttaacacaggaggtttggaaggggcgtgcccgttcatgtaaaaatgtgtctggggggctggagaggtggctcagcagctaagagcactggctgctcttccagaggacccaggttcgatacccagcacccacatggcagctcactgtctgtaacttccaggggatctgataccctcacacagacatacaagcaggtaaaacaccaatgcacataaaataaagtaaaacaaaatgacaggcctagactgtagatggaaggctgagtatccgttatctagtcatgatgaccacgggaaatagattaaaacaaacacagaatctgccaaggacattccaccagaactccaggctgggtctgattcaaatgcaactccaggtcccggagataaggctcagggtttaagagtaatggctgctcttccagaggacacaggtttgatttccagcaatcacgtgtgtctcacatccaccagcagccagaggatgtaactccttgttgtgacctctgtaggtaccaggcatacacttggttcacagacatacttggcagtcaacacccacacacataaaaagatgacgatccaggtactgaggtaagcagaggctgactgggggatgcatgtgttaactcagaagaatggcccctcatgcctctacccacagcttcaccgctccaaatgaggatttgattacatttatttatttatgtttgggtatatgtgggggggcatgtagggagacacggtaaccatgcctcctaagggctggctacatgtgtgcctgaccatgcctgtcaaggcgtgatcaaggtgagatcagaatgaggcggcatgggctcttaagcgaccacgagcacatggaaccctctcttccccttctgctgccccttctctctggcctccctgctctggcttgcatttggctggtatttatctaaacaaaggtatcttgagtctacaagctttttccttcaggggcacccataccatggtgaacaagtgaaatcagaagacaacttgtggaagtcagttctctccttccactatgtaggtaccagggatagcccctgaggtttgttggcaatggtgttacccactgaaccatctcactggcccctgtgtgctttctactttttgttttgttttgattttccaagacagggtttctctttattgctttggaatctgtcctggaacaggctggcctcgaactcacagagatctgcctgcctctgcctcccgagtgatgggattaaaggcgtgcacctccaacgcccagccttgtgctttctacttttacagacctttggtgtgcttccaatctggggtcactatggataaagctgcgggatcattcctaggcatgtgtgtgttttggtggccgcatgcattcatttctcttgtggataaatgtgggaatagaattgttgacttattgtttgttcttgttttattgttgttgtttgagacagagtgtcatgaagcccagcctggtcctcctgcctgtctcccatgtgcagggaatacagtcatgtgccaggtctgatggcttgttttctaaggatggattgggaagggcctgcaaggattgtctaaccatggatgtgtagaccatcaaaggagctgaggaatgttgtggaaaatcacaccagctgttgggcaggatagtctctccctggaatggacagcagccagaggctgtcctgaagagctctaagcatgagcaggcagagcagtgcatttcaaggctggcatgtcaatgaccttgatttgattacctgtaactgtgccatgtccccacagctctgtgaaggagttgaaggagtgacttcacaccctcatggttgcagacaggcttattccactcaggccaggggctgtacctgcctagaagaggactttgggttttttgagtgtgcactgtgattagcaggaagcatggatcaaatcaacaagaccttgtcacagcaaaacaggtccttagctaatggcaccactatggccagcaaatcagaatccaagtacagagggtacagaaatccccaagtaatcagattaggtttgtgtttacaggagggctgaggcagggttaaggggctggagattcaagacacattcttctgtctgttcgaaatgaagcaagcccttttacaaccacacacattgttggaaccagactgtcaacagttcaacaggctgtttggcttacctaatcagtttagtggcaataagaacagccaaaagggcaacaggaggaagtggagagtgacagtcaaagcaacccaggcctgcggtgacacccaagtgctgtgcaagtcatttcctctggcactgtggcactcatcagtacaacgaatgggaccaaccctgtgtgtatttatgaactgcacataaagtcatgcaatcattcactggaagaagtaaatatgaccctataaatataaaatattgcatttggcctcagcgattgattatggccagaattaaggaataattaatgaagtagccttagacaatagggctggccagccaggacctgtctcttcttaggatctagtgctacttcccaggcagaaagcagatggctgcaatgatgtgagcccctgttggttgtggggtgtggggaatatacctaggtgtgatgggagtatgaagaacccatgccaaaagcctatcttcttcaaggtgagtgtccggctccagcaatgccgttgagtgaggccaggattctcagcatcaagcagtctgcagcagcattggagtgcccttccctcctgctctgaactcgccaactttgacccctttccattgcctctctgtcagtcctgctgaagactgactactgcacaagaccaagtgagccctcgggaatggggttttagagatgcttgaactggaaaccactgttggggttcctagccaggtttgttggctttcctttacagcccccagccacctctccagctgtgccctgacagcacccggccttacacagactagtctgctccacttttcagtcccctttaaaaagaaaatcaagacttgggggttcatttgatctgtgaatgaggaacaaaatagtaaggatagctccaagatgaggttctaggcagagtatttacagaggtgtttttgttttaatgacactgattgtagcagtgaatagctgcaatcccagtactggaaattggtacaggagggttgggaggtcaaagtcatccttagctacataatgagttccaggcaagcctgggatacatagtatctgtctcaaaacaatgacaagatgaaaaaaagaaaatataaatatcaaaactggcattgtcctccaggaaaagtaaccttttgagattagcatatctcagaaaaattatgtgttaacatggaacttacttctcaggcccaagaagcccatgtcaggagcctccagaccatttgaccagaagcctgcaggacaagcctgttctccatccgcttctgctaatacaattttattggaaccagctaggtggatatgtatattcatcattcatggctgactttgagccacactggcagagctgagtcatggagttgtagtaggggctgaaagcagctcacctttctggaaagcatttgcccatcctgaacacagagaagtttttttttttccaaaaaaaattatttgtgtgtatatatgtggagagcacacacatgaatgtgtttgcacatatgagtgtgaatgcttgtatgtgtggaggtatatatttgtggaggggtgtgtgtgcatatgtacacctggaggcccaagattgacatctatgtcttcctcaattgctctccactttatatatggaggcagggtttctccgttgaacccagaactcaccaactggcttgtctggctccagcttgcctgaggatcctgtctttgtttctcatgcactgggattacagttggcccccatactcacctggctttcacttgggttctgggatcccaagattgggtcttcgcatttatccaacaaatgttttacctggttagccaactctcaagcaccatccaattttttaaaactgtggtaaaatacatataacatacactttaccatcttttccatcttaaagcaagagatatattagtattgtgtgagaccatcactcctgcaaaactaaaaatccacacctaagacacacagctcctgtttcctcccatagcccctagcaaccatcattcactttctcttgggatgagtttgactaagcacctcacacattaaatggcagcatgcaacatctgtctttttgtgcctggctcattttagcacaatagcctcaaagttcattcatgtgtagcatatggcctttccgtgtgtgtgtgtgtgtgtgtgtgtgtgtgtgtgtgtgtgtgtgtgtgtgtgtgttatgcaaattcatatgcatacacatagaggagaaagatgttgggtgtcactctgtgccttaatcctttgagacagggtcttttcctgaatatggaaatagactagcagtgagaaaggatcatcctgtctctgcctcccacagcactgcgtaagaccatgtttgaatttttacatgggttctgaggatatgaactcaggtcctcacacgtgcatagcaagcactcctacacctccccagcacagcccctccctagtttaaaagaattcttgtggctggaaatggtgtgcctgttgagaatgcctactgctcttccggaggacccaagtttgactcaacacactcagtggctcacaaccacctgtaactccagttccagaaggtctgacaccctcttctgcctttcagtgtctccttcaggaattgctacatatgtctacactcaggcgtacagacacacacacacacacacacacacacacacacacacacacacacacacaataaaataatatttttaaaaaaattatctgagataggatttcactatgtaggcacaattctcatggtctcttaggggctggggacatgtgccaccagtctttcttcttcaggctgagtaatatggctagcattgtgtgcaaatgccacatttcactcatccagtcatttgtgatggacactgggttgcttccatctctgactatttccagtatactgatatatatatatatatatatatatattatatatatatatattatatatattcataacagtatatccccaagatcctgatttcacttcttttaaacatgtccacaagcagaattgctggatcatacagtagttctgctttcaaagcttagagggaactcccgtattgtttttcatagaacccattcccatcagcagggggattccaattggtccgccttagcacactctacatggattgaaagcatttgtcttcttggccagtctatgaatttctgaggttcccagccatcctttccttgtcattaccaacattccagccttcttgtgagtcagtggatgggaggaatggaggagctagtgtcattgatgctgagagagagagcatcaagcccaagagacactggaagctctatgcttctcaggatctcagaactcagcagtacagaatcgagactcagtgcccttagcagaggagtaacactaagcctactccctcaggtcctctctgctggcctcctagacatagccaagagggagcaccttgttcttccagctgaagccatttttttctgggagtcccctttcagccatagtctgaagggataatgatagttatggtcctgcaggcatgtagctctggatcctaggcacaagtggatgactgggtctgagagggagggagagcctatctgcagaggaacccggaagactgagcctgagatagtgaagaggttgattctcccattaaagagcttcagtgcctggcacaacttctgtctttctgctgagatagggaagccatggttgtagtctgggtgacttatcagaatagacagaattatacaacatgtgccagggggcattaggagacacaggcagagagtgctgggccaattagacataccctggaggcagtcagaaagtagcaatggcctggtgttgggcatgtagtagcagctcccacatctacccggccaccagtctcgtgtacagacctgtggttagttttgttttacataatagtattttttcttacttgtaattcactcaagtggattgttctgtggaaccataaataaagcagactgagtcagatggggtggtatactgtaattccaacacacaagaggcaagaggattatgaatttgagaacagccttgggaaaaacatctgatttatcaatgtacctgtgtgttcagtgtgataagtataggtagagacaagagagttgaaggcactagagaagacaggagagtatgtttggggaggaccctgacttcagctgccacatagagaccatggggtatagcaagggcctgaggatgaaaatcatagactctcatggttccacagttaagagtacttgctggtcttgagaggacctgggttttattcccggcactagcatggcagcttgcacaaaaactccagttcctgggaatctgatgctctttcctggcctccttggtccctgaattcacatggtgcacatagacgcatgtaggcaagcacacatacaatacaatacaatacaatacaatacaatacaatacaatacaatacaacacaacacaatacatcttaataaaaaacagccctgagactctcctatgagatgggactcaacctgatgtctaagtcttcattggtgatagccaaagatggatggtgaggacaatgttagggatgtacattcctgtgggtgtgggctctgtgccctcataggagaggagtagaggagagaagtcttttgtttaaatgttatgttcctgtgttcttgaatcggcatatcttgcaacaaggaccttgattacatgtgtagcatgcacagcacaggtccaaggactgacgtagacagctgcaggtgtggaaaaagctctgacacagagccaggcctactgagccttggctacgtgacctcagaccacttctttcatacttgatttttatcgaagtgaagataattctacccccaaagctttgatgtagagatgacagaagggaaggcactttgtaaataagggcctggccagcttcccctggactgtaagtccagggctgttgaccctcctctgatgctaatcattaagcccaggaggaggtaggtctatctttgtgattcagggggtgagggaatccaggatgaagtgatgatctctacccactgcttacaccctcccagataacactggcaaagtctgcttgaagtgggtcctcaagacttctggtagcacattggattcccttccctggggtactttccaaaaggaagccgggaacagggatagccgagctatgggtacagcattcctgtgcgtgtgggatgttgacagtttcccagggaattcacattcacctccctgaagctgggctggagaattccaaagaaagtcccaggcaactcactgctggcatagagagacattttggctcacagagggaagagtccattttgggttacaggagaatcacaggctgcaatggtagaatgctctcttatattgaacttaatctggctctcatcacatgggctggggccatgaagatgagaaggtggcactccctctgaggctttatgctccacagcaggagacacaggagcacagtcattagagaaatctgtagcttctccctgaaaaaaaccacaacctcttacctctgacctttctagcttgtgtgataaatctagagaacacccagacttgcaaacagtgggggcgggcagtcttcttccaggttggcactttctgtgccaggtagggccaagggcaaagacacagctgtaaggtcctctcaaaaatgatcgtagggaaccctgggccatttcaggtgaaggacagtctctgattcactgacgtcattttgatgcccttagcattgtcttcctgaacctcaacaaccttggaacaatcaagcccagtgtgttgctccatctgcagcttggcagttggaggagcaagaaagctccgttgtgcagctctggggcctcaccccagaatgaagtaccactggccttgtgagatcccttgatgacaccttagtagaaggagcctggtgcctggggtaggggtggggcagaggaaggttaaactgtccacttgctccttactcacaaagagcactttggaagacctgtgtccaggggcctctgacatcttgtctttccaaagccatatcgttcttgcaggaaacttccaggactgaggcgagtcatccctgcagccttgacccagatcctttcaattcatataaaaagccctttggtgggttgaaaatgttgttcacttggtagaatgagcatgaagccccggtttctagagctacactgcaaaaattggtcatagtggtgcacacctgtgatcctagaactggggaggtggaagcaagaggatcaaagtcagccttgagtgagggtgaagctacctgagactatctcaggatggggcctttgagggaaagggtgtttccttgggggagatcttaggagacatctaagaacatataatagggaaaagacgtctgagagttcagggacctgggtcttgacagatacccattaagcaattctgtctctggatcttatgaaacaagaagtagcagattggctggtggccacaggtggttgtgaaaatctaatgaaaagtcaatagaattgtttttcagagcacaaatcaccatccaaatggtagaagaacttcatggagtcctcatttggccacccttgtttgccccaccagtccttcagggtcctttcagcctattgacttgcacagagatccaggcacatgtcgggataacaagggaaggcagagaagttgtgtcaggaccagaaccagaatgctttagaggatagggccacagctttaaatggtggggtcactgaggtcttagaagaggaaatggcttcatgctcttgtaataagatgcgaatggtagctgggcgaaaagtgggttggagggatgagttggaaagcagctgcaaccggaggcagcacgctgctggcagaaagaggaggcaggaatggacaggtggaaagaaatccaaataatgtgaaagagtgtgagcacgtgacaaaggagggaacggacacctcgactccaacggcttgaagcaggaagtgtggccgcttcaaggagggaattcaaaagaggtgctagcatgtccagaaagctagtgagctctggatgcagtgacagacccatgaaacagctgagcttgagaggcctttataagtgagacaagttgtcatcctttgtcaaatgcttggacaagaaatgcttcagattttggagtttggggacttttagagtgcttgtctactaagtcaggaaatctagaaattcaaaatgcccccaaacctggagattccttcttcccctcccctcccctcccctcccccccttctttgagagaggttggcccaaactcacaatcctcctgcttcagtgttctgagtctgacgttctaggtatgcaacaccaagcctagctttgaaatctaatctgggtttttgtgagggtcacatcatatcatatcggtactcaaaatgttttttttgttgttgtttggttttaagttttattttattttttatttaaattaaaaacaatcttattttacataccaatcccagttccctctccctcctgtcctcccatgttccccaccaacccccccatcccatcccccatccactccccagggagggtgaggcctcccacagggatcatcaaagtctgtcacatcatttgggacagggcctaggcagtcccctatgtgtgtaggctgagacagtatccctccatagggaattggctcccaaaatctgtgcattagggataaatgctggttccactgccagaggtcccatagactgcctgaactcgcaacagatacccacgttcagggggtctgtttcggtcttatgctggttccccagctgtcaggctagtgtctgtgctctcccacttgctcaggtcagctgtttctgtgggtttccccatcatgatctttacccctttgctcatcactcttccctctctacaaccggattccaggagttctgctcagtgtttagctgtgggtgtctgcttctgcttccatcagctactggatgaaggctctagggtgacatttaaggtagtcatcaatctcattataggggaaaggcatttaaggtagcctctccactgttgcttagattcttatttgagggagggatcagtaagatcgagtcgaggaaagaatagagaaggagagcaagaaaagagataccttaatagagggagccattataggtttaatgagaaatctggcactagggaaatgtccagggatctacaaggatgacaccaactaagaatcaaaatgtttttgaatttcagggtgcacccattacctttcttgctgttgttggacaaaagcaacccaaggaaggaaggaaagttgcatttgggctcatggtttgaggatgcagtccatcacgggggcgggggcgggggaggcatggcagtgagggtggctgggaggatgtgcagctggccatatggtgtccagtcagagaaacaagaatgaatactggatgggagggggagtgggggagcgggaggagaggagggagggagaactgggattgggatgtaaaaactaaaataaaaaaaaaaaagaatgaatgctgatgcctggccatttctccattatattcagccctgggatccagcgcacacagggcttcccactttcagtgagggtcttctggaaacatcttcacagactacccagatgagtcttcaagctcattttaaatctcaagcgaatgatcaagatcgcctacaccatagggtttggactaaggcattctcagcctgtaggttgttccatttttctcttttgctgtgatgaatactggggcccagagaggagaatgagctgcttgtaggtacataggcggagtgtgaactgcactagagctctggccttctggcctgtgaggtttcagttcccagactccaaaatccctctggtttctgttctttcagtccagacctcctgccatcctatttgtctgtgttaacagtgactcccttatcccaccactgaaacctgtcttgatggtggattgctatgcaatttaatataatttaactactctatataatttaactgtaaatctttagcacattctgtattactgataaaacatgagcagttctgttgaatttccacttaactttgcagcttggggtgaataactgtctgtctgtctgtgtatgtttccttttatgtaaaataagaataaacttactccaaaaacactaagtggttcaccagggagataaggggtctacaacacccaacacaggctagtaggtgctgggtatatgatgctgttttcactttcttctccagagcacaggctcgatgtttactttgcctgagtcaggaagactgaaaatgtgaaaattccttacagatgaaaacccactggtgtttataacagtacagtgaactaatgtggctagatcaggtgtgtgggggatgttttttctttgatggaaattatccagaagttatgatattgccctgaccatagtgggcagacaggaattcatcagtgctgccaataccaccagtgcattaggaatggtgaccaagcctcctcctgccaaacctttaaatcaccctgtccttccagttcatggaacaggaccacctgaggagcagctgtaaacttaacccttacccctctatttaactattgatataaacagatgaccaagaacagaagggcctgtaccctggagaacactgggcaactccctcagtctacacacaagtggatccttaatggcaatctggactgggaggtctatggggggcattctgggcctctgaaccgctggcatgcatatcgcaccagcctggcccttcctgtccaatggtactagctcgtgtgtgcgtgcgtacgtgcgtgcgtgcgtgcgtgcgtgcgtgcgtgcgtgtgtgtgtgtgtgtgtgtgtgtgtgtgtgtgtgtgtgtgtgcgcacgcgcgtgtcacaggtggggatcggagtccagcaggtactttctgagatttccaagttcctgtgttgaaagacaaagagtgcccccctttcccagagatacaaggtcaggtagtagaaacaggcagtctatgaagaaagagaaaggcactcccgagagaatggtggtgggctagttagtggctgaggaaaggcatataaccataagtaccagcccgagagtctcagggcccttgatgtcatttacatacttcctgcctctccctgttttgtacatctcagctctccccatatgtacatgctgtacattgcctgtagctcaggaaagaaagagtttccagtcctctgccagctgggtctcttcacatggtaaccttgatgctcttctttctagcccctactctctcctgtcacaatcacacattcactcaactaacaaagcagcaaaccaaccattgcaaagtgtgacagctatgtgtggtgaaagcaagggacagggaagggagggtggcgggtgggtgggccggataagggaagcttgagagtatggcttttgagccaaacatggacaggagcctaagaggaacactttgggcacaggtggtggtctgggtcaagtccatgagacaggaatgaacttgactttccaaacccacatggcaggcttgtcacgaggagtttagattactctaaatatgagagcagctttaagcagaggggaatgacaggacccaacctgcattttcagatctcttcagttgagcagggcaggaagattatcaggaagctcctagagagtgggctggaccaggccagggtggccttgggatggggagggagggggtgtttgaggatgttggggtggggaagtggggaactgtcagggcaatgtaaggctggatccaggggcaagaaggaaagagttcctccattcagctaatgggtccagaacagcatagggttgaggccctgtcttggagctgttacagggcaggggatggtttgtgtggactaaccacagcttgccccagacctcccacgcttcctcacacagtacccagtgtatgctggtagcttctcaccacagctgtaagatcacagtgggccaaggaccaacatgaggacagacaaaggctcatcaccctcgaggtgcagtgatccacggtggctagtgggagcaaactgctgtggcttgtggcaggaccagagagcgcctagctagtgtgcctcaggctgttttcattgttataacccccaaggaaccgttgtaaagatattaccttcttttatcacaagcctgtacagatacaccgcagaagccctccttatctttggggaatgcatgccaaaccattctgcagatgcctgaaaccactgatagtgccagaccctataatgtttattcttgtatatatgcacttgggtaaagttcaatctataaattaggctcagtaagagattaacaatgacaattaataataaaatagagcaagtatggcaacatcctgcagtaaagcgtatttaaaatgtgtggattatttagttctggatttttccagtcagtattttctaactgaaaccatggtgagtagactaacagagaagagggaagtaccagatctgtttgcagagtgtacccacatacatgctttatttataaatagggcatccccccttcggggggggggctgagaaatgcatttagtagataaaattcttcccatgctacaacagggacccacagaaagtctcttcactgtggtcaaacatgtccactcttgggggggcaaaatggcttaggtgataaaggtacttgctacaaggcccggtgacctgagttcaacccctggatcccacacggaaggagagaagtgactcttaaatgccgtcctctgacgaccacatgaatgctgtggtaatgcatgcccccaccgctctccccctgcctccttctgggtctctaggcccaaagacagcatgttctttcttaggatcagagagacctcaggaggcccaacaaaacacccctagttctgcctctgtcgccacttggccaaaatgtgctgcttgacaagtcctttcaccaggagctacaggcagatcccagctagttgagaccacgcatgggaaagcagttaaagttggcttcatttagattttatctaactgtcctgcctgcactccgtgccacaggtaggaaacccgagccttggagaggccagatcttaaagcaaatcaccgagtggctcacaggatcctccatggcagtgcctacacagcaggctgcagacagaggttgggccttgggtggcagcatgggcaggcatcctcaaagtgaggtttgcacactacatctcccacagattgccgatcgctggtctgaaactagaaaagtgtggtaataggagtcagcatttaggaatgtttctagcaatgtggtgaagtcactctacatctaggagaataaaaacatctgggctcagatactgttgtttttgcatttttccttttttaaaaaagtcttaacttgctgaatgtagtgatgcacttctttaagcccagcactcaggaaatggagacaggaggttcaggagttcaaggccgtctttggctacatatcaagtttgaggctagctggggctacaagagattctgtcacaaaaacaccaatttttttttaagttgacacagtatttgtgcctatttatgatgtgtaaagtgagagtatggtatatataagtagtatgtaatgatcaagtcacagcaattagcattttgtctccccaaatattatggattaataaacctttggcttattctagctgtttttaaaatttcttttaaaaatttatattattactgtatatgtgtgttcatgtgatacatgtgctaatacaggcttgcttgtagagaccagaggactaattgtggaaattgattctctccttgaccataagttctggggatggaactctttgagccattaggcttggtggcaaagtgcctttacctgctgagtcctcttgtggaccctagtttatacttttatgtatatcataaactgcaggctattgctgcacttccatgttgcagagctctggtttgtggaatattagtttaaggtgtgttacatttatgctgtggaatatttatttaatgatgcaaagatgtgttcattctttctttctttctttctttttcttttctttcttttttttttttttttttgagacagggtttctctatattgctttggaggttgtccgggaacttactctgtagaccaggctggcctcaaaccctgcttcctgggttctgggattaaagcgttcattcttttaagttgcatttgtttaactctgaagctgtgttactttgcctgcctaaaatacctgattagtctaataaagagttgaacgactaatagctaggcaggataggtggagctggcatgtagatagaataaatagaaatctaggctcaagaagagaggaagtagtgagaaaaggagaagaagacaccaggggccaggcatccagtcatacaaccagccatggagtaagaagggaagaaaggtatacagaataaagaaaagcccagaggctaaaagtaaatgggatactttaagttaagaaaggctggcaagaaacataagtaagaacaagtctccgtgtatttatttgagagctgggtgtcgggtccccaaaagagttaaacacacacacacacacacactcacacacacacacacacacacacacacaaaaccctacagtctggagataatccctcctcattaactattctttttaagaatatttatttttatttatatgtgtgggtattttggctctgtatatgtctgtataccccgagcatgcctggtaccaaagatgccatcagataatgtcagatactctgggactggagttacaggtgactgtgagctgccatgtggttgctgggaattgaactggggtcctctggaagaggggtcgatgctcttaacactgagccatttcttcagccctctaactatgctgtaatctctgtgtcacccctatcttttgaagtctctacctgacattttcctgttcctttttctatgacattgcattccatttccccagtgatttgtttcctgaaatttgtcatatttcaggaaactcttattctgtggcagattagaaattaaaacccaaacagctgtctcctcctccctggcagtttgagcagcacacaatggcggccacagtctctcaccttccatgccaagcataggtctttggccccagaattaacacggaaaaaaataataactttcagttgttttgctgaaccaattgatgggcagagcccaaaggtctttgttttagactggagtagacccagcccaaggccaagacaagcaagtggctttgttgtttccaagtaacacacaaagtgatgggttttactgagacatttcatacattgtttctgtggctcagagcacacaccccacccccttctcagtagccaggcagcttcatgactcgccctgccctgggaggactagctcctgccctctcgtgcagagaaaagccctgtgggctttgcaccaggtgtcaccagtcctatatctgacagaacagccaggaattaaaacaaccacaaaattgacatttctttatttattgggaagatggggcacatgtgtgggaacgcacacatgtagaggtcagaggacaattctgaggagtcagttctctgcttctaccatctgggttccagggattgaactcaaggttgtcagacttggtggcaagcacctttacctgttgagccatctcacctgcccagaattctattctattctctattctattctattctattctattctattctattctattctattcttctactctactctactctactctatttagagacagagtcttgtgtagcctgggctgacctcaaactttcaatgcagtccagttgactttcaacacctgtttctttgtcttcagctctccagtgctgggattataggtatgtgccaccatttgtgtgttatggtgttctggggatggaacttaatgtatgctaggcaataactctaccagctgagctataaccccagaccaggattttttttcttttcttatggtgttctattacagacaaaatgttgctaaatagccaggctggacttaaactccaacttgtgattctcccctccaccccctgagtattgggcttctaggcttataccatgtctggctcagtagttgggaatatgagacccaagcaaataatgtcttgtttcttttcctatccccagggcttaggtggtgcctgacagagagtatacacaggttccatcaatgaatcgagacctctgtaagccacggagaataaagcctttctcacatggcgaggtcacctgggaggtgggagctggctacctggcctatacagaggtttgtctctgtgtctgttgggctgggatcagctgggctactgaggtggagaccactggaactgtagctacaaggtctctgacaggacagaaggaagaaggaagtctaacaggacagagcaccccttctttctgctaccaaagcattaaaacttccacaggaatctcatgctgagggaagcttagtcctagtgtcagccaagtggaagcttttctctgtagtacttttgacaactcatcaaaccactttgcaggggagaccaaagcctagacaatgatgggtcagtaatgggcagggctgcatctttaccaagattgtagagttatttatacacatctcttgacttctatttaagcccaatcctcaagtcagtatcctgaagacagacctggaggtcacggaaccctgttattgttgttctttatcccaatatgatcacattgaataactttttttctctgcttttcactattgcttgtttctttaattggtacattgaggatgggtggataattctggcttttgggggggggatgctacagcttaggattgaccctataaggctttaatgacatatctgcctccacagcctacaatctcaataatttaggtgacctatgagataaactttaccctttaccccagagctccatttatctagccctgaagttagatgacctgaagacccagtagctaccccaggccaacaaggtaggcagcaacttaggaactactcaaagggtacccctatatatctgttcaacacaaacgacagagcataaccaaatggctgcacttcacttctgccttccaaatcttccacacaggtctgtcatgactagctctaacctgggtcctaataataagcaagggaattctgaaagatgtatgtcacttcacctaaagtggcataccacagagccgtcatagtggccctttaattctatatgaatgagtgagaatgaaggaagtgccttgtccaagggcatgcaagaaggattgaagttggagagatggttcagatccccaaagtccatatacatggactaggcatatgtagcagtccacatataagcccagcactcaggaggctgaggcatgtgatccttgaaacaagatggctagctagacaagcaaataaatgagctgcagattcaaatgagaggctctgcctggcctatacagaggtttgtctctgtgtctgttgggctgggatcagctgggctactgaggtggagaccactggaactgtagctacaaggtctctgacaggacagaaggaagaaggaagtctaacaggacagagcaccccttctttctgctaccaaagcattaaaacttccacaggaatctcatgctgtatagaagacagaacccaatcaagggagacatctgacatcaatatctgactcatgcaagcacacggacacaaatgtgcatacacccacatggataaatgtgcctgtgcaatgccaacatgactaaacacacacaacactctggcgcacgtgtgcgtgcgtccatgtgtgcctgtgcacatgcgcttgcgccctccccccatcacacacacacaagggcgtggggtgggcggagacaatgaattgagaggtgaagctggactatgaatgaagttttctaaccaatggtgtgacttttttacttttttactgtctgcactttctggaggcctggaagcacagccctacaagtcaggttaccccagctgctgtgctgggtgcatgattccactttctttcccagagttttctttggaattgaattctacaaatgtttgacaggcatcctcatcaggaatttaactctgagtcagacttagtttcttcccacgaggaacttacacgctgggtggtgaagatgtttgagctctcttgatactatatacagaaaggtcttgggattccagggctggggacatgattcagttgatgaagtgcctgccacatcaagtgtgaggacctgagttcgattcccaacacccatatacaagccagatgctacagtgcatgtctgtagtttcagccctggtgagggcagctatggaggtgagagatcttgtctcaaaaaaaaaaaaaaaaaaaaaggatggagagagagagacagagagagacagagacagagagatagagaaagaaatttgtcaacttctggcctccacaaatatgcacacacatgcatgtgcacacatacaatatatttttatatacactacgtgtacacacacacacacacacacacacgcacgcacgcacgcacgcacgcacgcacgcacgcacttgtgaagtgtttaggagtcccagtgagggaactctgggcttatcaaaggaaaggcaactccccaatggggtcttcaggtggagtatgagcttcaggccagtaatgtggggcaggatgctatatagccaggggatgaactggatttcaaagccagcaggactaagactaaggactaagaggtcacagtcatgtctggagaaagagcagttccatgtgcctagagggtagccattggaagagaaaaaaatagagccatgaaagtgaggtgggcagcaggcagtgggccttaagcacaggatgcataatcgagggaggagggagcagatactgggggagggcagagcagagccttgctgctcaagagaggaaatgcacttcagagccctccagacctggagttaacttgacctacctgctgtttctctttgggactctgagagactgcagatctgcctagaaggcttaacagaggtggtgaatggttgaacaaaggtccctagtgccaacacccagagtcatggcctaagcaggagcaaggagaggtgagactgtctctgttgctccaaagcaggttctgctacaggcaggcaagcccttagcatctgccagcctgctgggaccaaacaggattcccagatgactcagtgtgcttgcgcctgggatgggttggcccctgcacacactaactgcagcctcaaccagctgccttgaaataggacaggtggtggcttgaatttgaatgacagatgcaaaaggaagttagaggtaacccacttagcaccatcatctttacaagagagggaagagccaagacagacacagtgacagtggggagcttggatggaggctgcctccatctggttgcccttaaatcggcacatcggtctcctgattgtcagctgcttcacttggcttccagatgggaatggccgaggatatgaaatgattgggcctgggcaaggttgttgtcacctctaggggtgagatctgatgctgagaaacacaatgagctctatgggatctgggcaggccatcagacctgataaggcctttgtaccatggaagccattggtacccgatgcacattggagcatttgtgtattttacccatgatacatgtgtctcttcagtaagagagtggtgggtgtgggtgcctggaacattctattcttactatgttttcaccagcctcttagcttcaaatagaccacagaccatcctgttcttagacatggaaaacctttcagattttctatctgctgtagtgtggtgatattatttatggtttattaaagcttgcctgaggattcagaaagcaaagccagcctcaagatatagcgatcaggcactggtgatacacacccttaatcccaggactcaggattaagagtagacagatctctgttagttcaaggccacattgactacatgaaactgatctagtcttaaaagaaacagctcacacaaaggtgatctcagcacctgggatcacatgtctttaatcccagcactaaggagttggagacaggagtgatatggctgtttggagaaagaaataaaaggcaggaggaaacaggaactgagagtcttgcctctgaggattcatggagacaagattgccatttcagctggttagaagtaagatctattgacttggttgctttgcttctctgattttcaacttgaagcttgaaccccaatgccagcctctgagtctttatttatcgtgctatactgtaggcactagatccctagtctgcctgtcgattctctctgtctctctgtctctctgtctctgtctctgtctctgtctctgtctctctctctctctcgtatgtgtgtttgtgtgtgtgtgtgtgtgtgtgtgtgtgagtgtgtgtgtgtgtgtgtgtgtacaagcacatgaatatgtgggtgcatgtgtgcaggggtgcacatgggtttggaggcagaggtcaacagcgtgtatctaccttaattgcctttttccaccttattgctgttattattattaccaggtatgtggatggaagccagaggacaatttccatgagtcagttctctccttctactgtaaattctgagggtctgaattcaggttttcaggcttggtggcaagtacctttgccaaacaagtccgccttatttattgggggagggatggcctcagaggccagaagaaggtgttgtatcccttggggctggagtcacaagaggttatgagctttcagatgtgggatctgggaactctgcagtcctctgcaggagcagcaagtgcccttaactactgagccatccctctagcaccctacccttatatatactttattttttgagacaggatctctcactgaacctggagctccccaattaagtagactgcctagcaagcaagccccgaggatcatcctgccttccacctatcctttgcagtcctttacagtcatgtgtgcaagacacttcaccaaccaagctattcccccagcccttcatgtcctctgttctatgtgtaaaaccagacaatcaccaagtttccaggactccgcctttctggccctgcctgggccacttgcccctgcaggttcctgctccagggctgtggtcacggtcctctgcttcagctctgctccagagactccctttctgagcctctcatagttggctctgtatcagaactcatctagcccatttcatcacctctatgggaagagagagccaccacagtttgggggtgttatttgtgcctagcccttcgcattcctgaaaaactttgctggaaaaagagccctggaatagactctaagacacaagtcctggttttcattctgcagccacccagcttcatgaaaccagcttcctttctgatcgatcaaatgattagattagatgctaaaatgcttttagctccaacatgctggctgtgtgcacaggtcatatctcaatctagatgtgtatgtattgtgtgccttgcataatgtacattacatttattatttggttgtcaagaaagccctgggaggcaccagcaatacctattaagaaccagtgcttctcaacctggtggtctcaacccccagatatttacattatgattcaaaaaagtagcaaaattataaagaaataattttatggttgggttcaccatagcaagaggaaccatattaaagagtcgcagcattaggaaggttgagaataattaaactatgggtgaagcatcactggggttaagtggtttgcttgaagtcagggcaacattaatccaaatgtaaaatgaagctgataaagggatgcccagtctcagtgtggcctcacttttagctggcacaggcttaggcagcagaggtaatagctgtatcaagcaagatacctgacatctacctctggccttaacacgtaatacatggcacacacacacacacacacacacacacacacacacacacacacacacacacacacacgacttaacagtcccctcaagaccttactctaggcacattagagtcccaaccatagctctttcaacggagtccaaagataagaggaggggactaggttccacataagaggagggcagagggttcccctgaatctagattctgaaaccctctggagatttctggttccctaagcaccattcatgtgtacatgcatgctttgtggtgtggggtcagcccttgccacctatatttccttggttgttatcaataaattactgaccttgagccttgagggtcagggagatgattctcttggtaaagtggttaccttgaaagcctgaggatttgagtatagatccccagaatccatataaaaactgggcatggtggtatgtgcctgtaaccccagcactatgggaaagagtcgatggctcctgggggctgcctggctagctactttagccaaaacggcaagcttgaagttcagtggagactttgtctcaaaaaatgaaggtggaggttgatcaagaaagacaagtaacattgacctctggcttccacatgtgcgcgagcgcgcgtgcacacacacacacacacacacacacacacacacacacacattacacaaacatattgaccttctgactcagagtttctagccctggcccagctgttcatctctgtgtggccttggttaatcctgttatcagtgctggcccttagccatcttaaaatgaggtccttccagctctaaaagctaggatattatgatgtgagcaaatttgtgtgaacttaatgcatttgaaaagagaacccaaggtcttggggccatgctttctcccaggaaaagctgctagatccacagatatagcctgctttgtttactctgcacctggcattgctggaaatgcaataaatatccctgagtgcttgaaagaacagctttaagcttaaccattttcctactgtttagacatgacactcatccaggcagtgtgatttggtggaaatggtgtggattatggatcacacaaaccccctcaatgcttagaagctgtgggatcttgggtaagctacacaacctctctgagccttatttcctcattggtaaaatgagagtaacgggtcccactttacagcactgttatgaggaaaatagatgagagatttagagctctcaacacagttcttggtgcatagtgaatgttcaacaactcttaatgacagaaacaaacagcaccaggatcaacaccctgtcaccaaggatcccagtaacaatagcagcaagacaaagccccttacactgagtagatgaagtactctgcagattatccagtgttttccattttcattgtaattgtctgattttattttcataatcctgtgagataggtgttatacccacttttcagttaaggagactgaggctcagagaaatcaagtggcctggtccagaatgatgtgtccaacaagggccagagcatagacagggtcctggggctctggtgccaagagtctgtcctattgtctggccatcatatctgtgtttttccatgatggagatacagggacatgtaaaagcaacaatcagctgatgtaagaactaaagactaggcatacctcactgagcagcggaaagtggccattatccaacacacttcgtttactgctgggtaaaagaagtccctctaagtctgtgcgattagcttggttccccttctcaggcctccttaactttggcactttaggatttagttccctgctcctcattccttattgtttcttgttcctctttctttttaaattttttaaaaaaaatttgaaattcttttatatttttaattaaaacatagttatatcacttccccttcccttttttccccccagatacctcccttcccaaccctcccgggcccccactcaaatggacagccttttctttgattattatatatatatatatatatatatatacatgtatatatatatgcaaaaatacatagatgcaaccttatgagtctatttctattgcttgtgtgtatatggtttcagggctaactagtttgcattggataactagtaaaaggattcatctctgggagaggctaattctcctgcttccagccgtcattagttaccagtaattctttgtccatattattcccacttccacatgaacgtgtctttgatattaccgtcattctcgtcttgtttgtgcagccatttctaggacggactgtttcacagcacacttcctggcactcaggctcttgcattcttcctgccctcttcccctcaatatcccttcagccatagttgcaggagctgtgatacaaacgcatcccctggggctgggatttcctggatgtgttggttgtgtccaggtgtggttttctgtgatggtctccatctgtggtaaagagctgcttctttgctgaggggtggtagctacacttccctgtggggtaaagagaaggctaagaatgtagttagaaactagaccagtctagcaaagtggcagcagttgatccttttctttctttttcaggttgtttttgtttggttggcttttgttgctgttgttagcacaagtaacaaaaatccagagatagttattgtggttaaagctgaagattgatgatcagagaagcaaaagggccagccactggagagttctcacttctaccagtgctcagaccaaaggggcgatcaagtcctctgcatctccagaccgcctagactgcagactgaatacacggagatcctgagctcctgttttatattcctttctagtgctgggattaaaggcgtgcaccaccaccacccagcttctatggctagctagtgtggctactatgattaaaggagtggaccaccactgcctggcctctatgactgtggctagctttgcattctgatcttcaggcaagctttattagatcattaaaaaaaatatcaccacattgtgcttctctgtgtagtcttggttgtcctggaactcactctgtagacctggctggcctcgaactcttgaaccttttccaagttccatgacctcactagccctgggaaattgtctaggtatctagaccaaacatgatttccctcatgttgaacgggtcttaagcccagttagacagctgttggtcactaccaacatgtgagcaccactactgcccctgtatgcatatcttgctacgctgttcattgatttggttcataggtgtagcagctgggtaggactattaattgctttcctcccttggaagcttgcatagtatcttttggtaccatggcaatcttcagactaagaggtttgtctttttattgcaggggaggggagcattcccactatagtttacataaaaataaagtcacttcctttcagaatgttctctgagtatatcatctatcagctcacagagatctgcctgcctctgactcctgagtcttgggattaaactgtgtgctaccatacccaacactgagataaattcttgcagtccaggctgacctcaaactcaaagcctaatgtggcactgctggaaggcaatgagacctttaaagggtggggtccaatgttggtatcttcagactatttgaaatactggggacctaacctcttctatatatgcatgtagtgtgtgtgcaggtgtgcatgtatgtgcaggcgcgtgtggagaccagaggtggtgaacatcatgtatcctttactacggctctccagagtctctcactgaacccagagctcaccaattggctaggctggctggacagccaactctggaagccctcctgtttttgctcccacccccagaagtaggcctgcaggcatgcaccattacacacacacacacacacacacacacacacacacacacccttctacgtgagtgctggggatctgaactcatgtccccatgcttgtggggacatgcacattacggactgaagcctctctcggctctgggacccttcctaaccccatctctttcttgcacttgtgctgccttgttaaaccccaaaatcagccgggcggtggtggctccctcctttaatcccagcactcaggaggcagaggcaggcagatctctgtgagttcgagaccagcctggtctacaagagctagttccaggataggctccaaagctacacagagaaaccctgtctcgaaaaaaccaaaaataaataaataaataaaccacaggatcaaagcagcaagaacaaccaagcataacttgaagcttctaaaactgtgagtgcaaacaaaccatttccatgtttagactgatctgatagtgcttgttactgtcacaggatgctgaccaatgtattttagaactggaaagtgtataatgacctgagaagagaagaggggataggaaataaagcaagagtgggctagctactcagaaagtttgataataaatgagcttttagggttggggtgtggacatgagaaggagaccactcaagagatgatttcaatgtggccacactgatcaacaaagaaaagaagaaacagaagacagcaggatgtactctcttctgagctttctctttgctgtttttgctcacaaggcacctgtatcttgcattccctcttgacaccctactaagtgcagggtgtttgaagggtgtgatccactttcattcaccccctgagtaactacactcttctattgagcgcccatcttcagcagcccctagagcctccttaaagggcaaggtggaagcctgttctcccctacttactgagaaccatgtgtgagaacaccgtgcttacaaaatgtgtctctccacacacgtgtgaattgggtctggtcttttacccatttggcattctggaatgatctgggctccatgccacccaagatgatctcttgttcccgataaccatcaataattacaatgatgccctggtagggtcccaggaagctgtagttcttggtgtttctggcagtgcagggtgccagaatgtgaggtacaggcagaagccaaaggaactttgtgtctgaagcagccccttttcctagatgattctagcgtaggctggataccgtaaggtttctgtaagtaaacaggctcaccagctcatccaagcagaaggaacaataagtcacagaggacagtgtcaggccacatctggtgtggggccagcctcctatagccattgcctaatccatgcctcttgtagtctccccaagactgtttagcttaccctgttgttttccttaactttgcctgcaatgccctctgtcccaagctgctgctgcctctgtagtcccccctcccccacctctctctccctttctaaaaacaaaaacataaaaactattttaattatgtgtttttttgtgtgggtgtgtgcatgtgaatacaggtacccaaggatgccagaagaaggtattgtatcccctggagctggaattacagacacctgtgagccagccaacatgggtgctggaaaccaaacttgggtcctctgaaaacacaggacatgcacttaatcactgagtcatctctgaacccatcttccttccctcttttccttttcccaggcaggatctcaagagctggccttgaacttactctatagcaaggataaacttaaactttggatcattctgcttctacctcttaaaggctagagttataactgtgcaccaccatgctaaggatctgagtcaggcactagagcagttggatgaatattcttccgacggagctacagccccaagccctaaaattctctttgcatgccacagatctgatcagagcacacctttggtgaatttctccacagcctccactgtgagtccttgcctatctgtaggcattgggaatgttcccaacttgaactctacccactgtcaggcctgtccaagagatttgtttattcctgtcttcatttggagtgtactgtggctcattcttggggccttctcagttgttctttctccagtcttcaaagttctgctgggagacatttattataagggctccttttcaactatcatccatcccactgagctttacaaatcttaaaatttttcattaaaattatctgtgtattgtggtaatccatcatttgagggaagaaaaaacagctttcttgactctattacattaaatttttagcatgcataaaagccagccttgctccttatttgtattcatgcctccctcctcttacgagactttgctttgcagcccaggtcagctttgtactcatgcaagtatcttgcctcgggcttctgactgttggcattatggactcggccaccacacctacttcaatctctcttatcttttggacaagccttttttgtttgaatatctgaccccccaatacccgctccaagccaaagaagcctcacactccttgagtatggagttggtggagggaagacaggatgcttctgatggatgtcagcaccggatgagatgaggatgccatggaagggactgtgggaatggcattccctccctgaaccagtatttccctttgcaccaacgtcataaggagctagggagcccgaagtctggaaagggccgcagaagaggccaggcagggcctctggctaaccgtgtgtgtcttgacccttttacctctcttaacctcaggctcttcattttgaagttagctatatcagtatcatagaattgtgaaactttagtgaacagggcccctctccctaatcctttggtatcagtgtctttctttcctgtagttgggcttttattgcttccatgtttcccaaccaagctgtgtgctcctcctcagtccaagacaagaatgatgtccagtccatcttggcatcctcccctgtggccacccccgcggcacttagcacgaggaagaaagcagagattctacggttcttttccaagatgttctaatgaaaggaaggattcagagtcctggttaaagagagacccgctcctggttcctctctctagggaggctgcaggagagtaacaaacaatgcgaatcgcgcagacaatgtaagatagcggagtctcagtcccagcttgccagagagggacttcacctaacagtccagccggaggccgtgcgctgctcaccatagccgctgcgcctcctttgtgctgtatcaggtgcaaatccctggagcgcgggctgtgcgcgctcgcgctttgaagcgcgcacagaaaagcccagcctccgcccctgctcgccctcccagatcctctaagatctactcggcttcccccgctccagccagcgaagggaggaggtcggacacgtagccggcctcccagcagggcttgactccgtgcgggcgggcgagagggagggggagcctgggacccgccgctccagcccgctggccttcgaaagatcctcctgggccaatggcaggcggggcgacgagccctgattggtgcaggcgctctgctgatcactgtggaaacccgggtggcggggaactcgggaggatgcggagcccggagcggggggagtctgaggggtggggggaggaggcatcgaggctctgagctaccctggagttttcaccaaaggcaaaagtccacagcaggcggaccgagggtggggcggaggaagaggaccgcttgggggcactgggaagctaagggtactccagagggaaggcagggatactggctagccagtaaaggcgaggaggagcgaaggcgaggggaggaggcgcggtgggaggaggagtagaagacaaaagccgaaagcgaggagggcgccgaccgcacactgcggccgagagagggaccgtctgtgctgcaagtcgcggactcccggaggctgtagcgcacggggcatctgggtggacaggcaggatggggaagggaggtaaccagggtgaggggagcacggagcgccaggttccgatgcccaccttccgctgggaggagattcagaagcacaacctgcgcacggaccagtggctcgtcatcgaccgcaaggtctacaacgtcaccaaatggtccaagaggcacccggggggccaccgggtcatcggacactattcaggagaagatgctacggtaagggtctgggggtgccagccacccttgtctgctgcaggccggtgtcaggaactcggggtccttgggcgccaaacagatctccagttctgaatggagcgcaggacgtccaggagggaaagaaagtgtacctgctgctctcatcttgcgcccggaatcgtccttctctgggccagctgggcagacttgggccgagccttttggacccggggctttagcacctctgtggaagtcccatcagtggcaaactgtgcccggtgcatgtccacagcgcgtactgcgcgcgggtacagctggagccagggactctcccaagggggcgctccggcctccgtgctttggcgctccccatgtggaagatggccacccctgggcgccgggagaggagcctgagagcgggcagccatatgtgggactctcctgccagaccaggggggcggagaaggaaagctggtttctggccaggactcgctcctgcttggactcctgtctgagaaggtccacaatggctgcccgacagagactgcccagtagctcaggttcccacgctcccgaggattatcccgactcactccaagtgccagccttctgggaaaccctggtggggaattgatggaaggcgaatgggttggcttttgcaaagtccagatccagaaggggatctagaaggtgaatttggtagcaccgagactggcttggcaacaggtccttctgcctctggggttactctcggacattcaactcaatagccctctgtttttaagtcctgccagaatcgcccttctttcttgcacttctggaggttgttggaaacgggggacctctctggaaccaaggctgcccttatgcacaccaaatgtgtagctcagcaattgcatagaaccccaagccatgcctggccccacccccaaccgtaaaggattgtgtggtcgggtgggtaagaggaaaagcaaagtcaaggagaaagatgggaccgttttggcggtggtggtgagctgaaggcagaggaaaagatcgaggctggagagaacttgggaaagatgtttgggaagaggcgagaagagggatgaactcagaacgcattccacctgaaagtccagggcactgacctgcttctgggctttggttgtgcaagtttgttagtttcaattcgtaacttccacctcttttcttctctttgagatcagcctaggtagccatactctaaactaatcaatggactggaggctttgatcaacaggatacaatcttactcaagactgaggagagaactggcattattcattctgcctaaagcctattttccttgcttgtggactctgcttaagcccatgggactggtgctgctaatcacaccttaggtgggtgtaagcttttcatactccttgagtgtcctagcttggacctttccacaaccagagaggaccttggcttcccattgagaagatgtcctagcaccactgttatgtggtgctagtctgtgcatgactctgtaggtgaatcataaaggcttcctcccttctcatcaaaacatttcctaaaaagcaaaacgataagtgttttgatctgcttattccatgtcgtaagagaaataggttttcttgcgtggaagctcaatcaggcaacaaccttgaactttgtagtagtttgcttaagaaatcagacatatttcatccttagtgtttccctgacccagttccttccaaatgcctgtgctcagagcaaagccgtcagatacctggatggctaaaagctcctgcatgctaaaagcctgatatgctgttcactgctgacctcattgttttcggtgtcattttcattgattgtgagtctactgtctgggatgttaatcgtcccatgataggaaaggtaaggtgggactcagtgtaggcagtagatgtgatcactgggagtgacccatacatggtctcaccagatcaagacacccccccaccctcaccccaccccagtgagcaccagatacacacaatggagagttattagaaaagcacgaggaatggaacaactagaatgtaaagtacttgagaaagggagaagaaaaccaagtaatttgaagcaagctcatttgatgccacaaccaaagtcttcccaaataagacttttggggatgcaaaacacactccctggagatagagttggagggcagtgaagtaagcagtgatattttctttggcacacaccccccctttctttttataccgtctgagaccaggttggaaaaaggtcttgggcaacaagaagatcttcaaagggaacttcaagagcaggaatccttccccaggttgttttgcaagtagctttgccccttagtggccttgctttcttttcagagcttgaagggaatgatggaggatgcagtgaggtttggggagactggccaacagatggaggctggatcccaagagcactttcattgccgtctgtccaaggatatctgtgatgtcttggcaagaggctggaaggggaggccaggagtcaaggaagccgttttgaggagaatctaggtgtccagtggagaatcttctgtttctgaagaaaacacctcagagtgctcacttcttccctagaaggatggagcagttgtcatttggcccttctgtagtcagaccctggccttacttgtacttgtaaaagtcacttagtatggggctggagagatgggttcaattcccagcagccacatggctgctcacacacctgtctgtaactctagttccagagtttctgacacctcacagagacatacatacatgcaggcaaaacaccaacgaacataaataaaaataaagaaaaagattgaaaaacaaaagtcacttagtggcatgtgcccagagccccagctactcagaaggctgaagaggatcacttgagcccaaagttttgagaccagcctgggtaccacagtgagattatgcccctaaaaacagtgaagttttgcagctcataagcccattggtatatgctgtctcatttaattctcagatcagccctgctactgtcctgtcccgaggctcagaaaccctgctcaggtgttcagcgggagttgctggcaccaagtccgacagcctcaccttcctctctctctcctccccactcctcttttttttacatctttagtcatttcctgatggtcccccagagtgtctcctgttttagatttgctgtaggcacaaagaactgtcacccatgccccagcatgggaatctgatcagtgtgaaatgagccccacttgtgaattttcattttcagcaagagctcatcaaacattcattaatcgtctccatggctccgagctgggctctgagcagggcctcagcaaaaaaatgaataattcagacagtgacctgcatccactggattgggtccctcccactttttctctttctcagactggggcttgaacttggatcctccagttccagataatcacttctcctccagcctgccttgttttgtctatactttttgactcatctgccttgcttacttacctcttggagtcaaagaaaggcaaaggggaccagaggtgggttctgtcattcagcctctcttatattgtgcttgtaaaaaagcagcagcagttgagaaaatggaattttgcccctgacagtgtatgagggtcaggttatcagagaacccaaggtgggagtttctaggcctggagggcagctctctctcctcagctgagtaggagccatgcgactcctgcccactgcattttggtgggaggaagacaccatatgcagccccagcatccccttatagtgatgctaataaaatacaaatggaattgagctggggagatggcttaatagctaaaatgcttgctgcccaactgtgagaatgaagcacggatcccagaacccacgtaaataccaggggtggggggtggggtggggggagcagttgatttgtaattctagcctctgaatgcagagggatgggatccccagagcacgctgactagtgagactaagcataccagtgagctctgagtttgatttcgaagccctgccttggttagtaaagtgcaagagcaactgaggatgattctcaacattaaccttggacctccatatgtatgtgcacgagtgcacatacacacatacatgaagggggaaaacggaaatggcatcacatcttcatgccccgtctgcatctgtggggacttacttcctgtgcagccagggaagtccacatatcctgtttttttgtttgtttgtttgttttgttttgtttgtttgtttgttttggggggtggtttcgacacaaggtttctctgtggctttggattctgtcctggaactagctcttgtagaccaagctggcctcaaactcacagagatccgcctgcctctgcctcccaagtgctgggattaaaggcgtgtgccaccaacgtccggctccacacatcctgtgttagcagatattctcttaccaaggggctcatggaccactgaatgctgtctacctattcagcctcttcttggaggggacacaaagaaagtcagaaaccagtatccctggtctctgccatctttttaagtctccacctgtgagctccaggtccttcctgctttgagaggcatctaggaaccctggcttactgcaggaagcactatgtgtcctcacttactgagcttgggcttctcaagtccctgaccagcttcaccggtatggaaagttactctgtcacagctgtgctgtgcggaagagcctgcacaccatcagaaacaggtgtgggggccttgagctcagtgtgaggactactcagaggtggcagaggcaaggaaggtgtgcctagagacggcagcgggatggctgaataaggactagcagatgaacagcaagtgtaatgcttaaggatctgggcctctgaccccacgaggtgcctgttcagatctcctgcacctgtgtaacactcctttcaccttcccgactcttggcctgcttcctagaaagactttgcttctctccctgtcagagaaggagagcctgcttccaactctggttccaaaactatcatttgggttggcctggtcttgccttgcactgtggcccactctgcaacctggcattcctgtaaccagacagctgttgggaatgacagggttcaaggcacatctatggccccttgaaggagggacatctgaagtgatcagttcccaaaaaagagaaagctcatgtcaagggaggtctttgtcctaacagcagaaaaatcagcagtcagccatctagcccaggttctgcccagtcaactcctgggtgtgacaggaggacacaacctagtccttctcatcaataaagcaggaccctgaaaggctaggctgtaactcagtgtttattgcttgtttagcatgtgcaaagccccaggtttcatttctagtactgcacaaacaaaaggcaacaacaaatgagctacctgccagagctgggtaaatagtggctgatgactcaggccactcatgtggcacgcctcctagcctatgaaatgacaactagacccaccccagggtgtgagtgcctaaaatgatgaaaagttcccgtgttccagaagtatcagttgggttgtataaagatgacagagggcagagtctacactggactacaggatgggagcatatcctggaatagaggttcacagccactgggccctggggttcttgaagccctgtgaacgaacactcttgtgaagcaggtgtgggaatggtcacaacagcctacatgtggtcctttctcctctaggtgacaggctttacattaagagtgccattttgcacattatgcagttttgtgtgcttgctttttgagacagggtttcatgtatttcaggctggcttcaaactgagaacagcttaaacttctggccctcctgtctccacctccacacctggtttgtgccatgctggggcttgaacccagggttctgtgcacaataggcaatcactgtccctggagagctatatctgcagtttatatgtgtatgtggtgtgtgtgtgtgtgtgtgtgtgtgtgtgtgtgtgtgcgcgcgcgctcttgtggaggccagaattgatatcaggtaccttccgctattgctgtccattttatttactgaagcaggatgttgctcttgctcttgctctggggatctcaggtctccatatcctcggtgctagtattactggcaggctggattttatgagtgctgggggtcctatgccaggcctcatagttgcatgccaagaacttaatccactgagccatctatctccctagccccccagttagtggtcctgatgttgatatagacaagaggaaaccgagaagcctaaaactggggaggactgggaaaagtttctggcaggtaacactgaagcaagttctacacttcttgctgtagaacttgatgtgggaaggaacttgagtctgttctgggaacggctatgctggccggaacagtacgctggtcctgtggagcactccactcctttttctgagtggattagaggcatgaaggaaagaagcattcctgctctgctcacccaaatgcaggacctcattgcctggaagctttgaggccctgaaaggccttggctttctgctgggcgtgtgcctatgtccttcacctgattttagggagctgaggctatccagagccctgtgcaagtggctaaggagtaactaaggtcaagacagggttctcatttaccccatacctggaggcatcctagatggacacagcagtgtgtgtgggcaggaagagcttaggtgaatgaaggcacttgctagctaccaaactttacctttacctttcagcaagtggagaggaatcttactttcctgtctatagggaggggatccaggcctgagccttgactttggcaactcttgctggactttcttctcagagtattgctagttttgtttgtttgtttggttttgtagttttgtagagaagcctgagcctggggctagcagaactggtctaccctcctcactgcctgcctgaggctcatgggacagctggtttctctctctgataagacccttgggtttgatctagccccttgttttaatcttgccctttccactcagctaggggagatttatttgttttgtttccttgtttttaaactctgcttattgttctcttgtacgaaaatgttactttgcaggttcacataatggccttgctgggattacagatgtgaccctctttctaaatgtggaggttgaaagataaagaaacactgtctcttctgaaccaagagtcactagtagtaatgtttgatcacatttgctttgtcctaatatgtagacaattttcttttgaaattaagttgtatcaaaaccaggtgtgatggtgcatgcctttaatcccagataatctgggttcaattcccagcacctacacggtggctaacaaccatctgtaactccagtttcaaggtatccagtgctttcttctgactttcttgggatccaggcacacacatgatatgcatacatatatacaagccaaatactcatacgcataaaataaaaatacctaaaattttttaaaaagacaccaaaaagttgtagcatcacgtgatgtccctaaatgcttcccaagccataagagtgctctgtgatcatcataacacctctgtcacagtcacaaaaataattagaagctggagttgtgcttcatctggtagggtgtttgtctagcatgctcctggattcagtcccaagcattgcataaaccaggcatggtggcacacgcctgtggtcccaacacttgagagattaaagcagggagatcgaggtcatctttgcctacatatgtgctcatgggccagcctggttgacatgaaaccctgccttacaaaattaataatcccttctggatcaaaaatccaacgcctgtttttcttttcacatctacctcacaagagtgttgtgtaacttctgttttccctccagccaggaacttttcctagcgaaagcttgtggtctgtatgtctccatttagaccactgtccccacactcacatctccccatctcactatgtcggtttttctggttgtttttcctggtaccatatggcttgttcaactcaatcctgcagtgcctcagtttgaatgagtggtgggaggcaggataaacatgtaactggagcatccagttacacgccctgggagagatgcttgcttttgtggagataatgtttgtcatatatgtactgtgtagaagaagctggcagaaccacttcccacatgacaattattttccttctttattcttctgggtatttactaatgttgccagaattaagcacatttcacttcatcttcagaacaagaaaggttaaaatgtagaatgtcatagtaacgttaggggaagtttgcaaactcatgaaaataaaacagggcataacccatgtctttagcaatagtttagatcctccccaccccccaaccctgtggcaaggttttggggaattattttacatagttccatgctgtttctttctcctgttgttgtttaatgtcatctaagtacattttccatgccgtagtcacttcctaaatgttagggatccagctgagggcctcacacatgctgggcaagcattttttatcactgagttaaacccccaccctgggtcttatctcttcattgataattgtgactatgtggatgaggagctctctggagtggtgggtggtgtagtttgtgcactgtgaaagacactcaactcaggagcaggccagggctgtcttccctgagtcctgtgcctacctgctacacctccctggagacctgtctgtccacagacccttgaccaactcggcaggcctggtgccagtgcagcagctcaggatggttactgtttgcagctggagtccggcaataagaatgagtctggagtgagctcttgcggctgggtggtgggaagccccgcttgctgtctgagcagagactctgctaataaagcaccagccttcccggagtgggaggagccagctttaccacctttttctctacttcccaggatgccttccgtgccttccacctggaccttgacttcgtgggcaagttcttaaagcccctgctgattggtgagctggccccagaggagcccagcctggaccggggcaagagcgtgagtgggattgtaaacttgagggaagtgggatgaggctgggcggacggtaggggtgagagtactttctcctcaggaccccactgtcagggctgtgacaggagagtccttgagcctgtccaggagaatggcctcagagtgtctcctgggagccaccagctgggtgataactaatggcatccaactggactctttgcccctccccttctttactcaaagctgccagatgttggtctggtacacaactatctaagaaagggcagaaacagtgagacagtatcggcgaatgaaaagtgtggctgtttgaaatgagcaggacccctcatttgtcactgagtcagacaccctactgagtgccgggctttaaagagcagtatgtacaaatcagtccccaggtctcaccagctgaccactcagtggtaaagccgcttatagagcaggcctggcatgcatgatggagatgtgtcgaacagcatgttttagagtttctttaaccccgagggtccctcccttctcctcccctcaatcctttgcctttccctactagagttacccatctcccggagactaggcttctcctggccctaagcaggtacccatccctgtgtcctgagcctgttggcctggcatcttatagggtgggctggttcaggtcctcagaggcactccatggtctcagagctgagagactttcaccttcaacaggcaactttgtgtggccttagtgaagcaggagagggtgggccaccgccacccctgcctgtcctagagagatggtacctcagactgctgtctagggagagatgtttcttgagggaaatgatttccctggtctgagaccaggttggcccctcttacttcctgcctgagctggagtaattcttaactagcccctacctcagagtcccagcaaagcctgtctggaaggacacaggctctttcctggcctggattcttggttggtcctccatagaggactctctgcatcctgggcccccatacttgatactcactgtgacttctctggcatccttagtgttcatgagcaggaccccatcctgcacctgcacagagtcagacagtgaagaatgcaagtgctctcttttgaggcatagaggccttggcatgccaagcaattgcactattgcaaaactagcttcatcatccagttctagaactttcatatcctctccaactgatattctgtgaccttaacaacagttcctcactcccttcaggaactgccagaaaccattccgttgtctgcaaagcatgtgactcctccaggcacaaatcatgctgtatttgtcctttacaaaattgtgttagtgtatatcttcattgtttttgttttctttattgttttgatatagggcctcatgtagcccaggctagcctcgaactcctgaccctactactttctcaaatgctgggattgtgtgctgtcacacctggcaacttgtgtatgtcgattgtacagaataataagtttcgttctgatatcgtcgtgcaagcatctgttcttttataattggcctatttcatttagcatgaacttcattcacgataggacacattgtagcagcatgacaaatttttctttgtttttaaggctgaacagtttatgtgcagaacacagtcaggtatactcaacctgcagcctaacacaaaattgtaaacttacttaaaacactaccaagtgtgtgcatgtgtgtgtgttgggggggggttgtaacttgaattagaaaaagttctcaagtgtggactttgtagacgacaacattgtgttgcaatgtcaaaaggatacatatacctagaacttagctcctcaacctcactgaatttttggattgtttctacatttttctaaaaaatgtgtgtgtgtgtgtgtgtgtgtgtgtgtgtgtgtgtgtgtgtgtgtgtgtacacatgtacatgtggatgcctatggaggcccaaagagggcatcagatcccctggagctgtaattacagacagctgtgagtggctctatgtggatgccaggaacagaacttcagtcctctgtgagagctacagtcactcttaaccattgatccagttctccagctccagtttctgttttttgcctgttgtgaataatgcttctgagaacactggtttggagattacaagctgcttattattattaattgtttttattgcacacggctataggaggtcattttcacacacatatacagtgtacttggaacgtattgtcccatttccttccattcccctcctagctcctccttctacctcctttagtcccttaattcttttaacctttatttttattttatgtgttctgaatgttctgcctgcaagtatgtctgtgtatcacatgcatgcaatacccttggaggccagaagagggtgttggatgtccctgagactagagttacagacagttgagagccagcaactggatgctgggaatcaaacccttgtcctctggaagagcagccagtgctcttaactagagtcatttctccagccctgttagtcagtctggttcctatacagcttcatttctagttcagtgtcatctgtacatctatgacgtatagaatccttgagagaactgagaaaacaaaatatttgttttcctgagactgacttagatcacttagtatgattaaaaacagaagcttctgagtgcgactcttcttttgcctcttatctagctgtgacgtatctgcaataatggtggccgttgctgcatctggtggctgggatcacacagggttcaaggagctcgccacagctatagcctgtgctgtgcttgaacacacgttcccatggagggtgtagtggctgactctcttttatgtccttgcttaacagtctcagatcactgaggacttccgggccctgaagaagactgctgaggacatgaacctgttcaaaaccaaccacctgtttttctttttcctcctgtcccacatcatcatcatggaaagcatcgcctggctcatcctctcgtactttggcaatggctggattccaaccctcatctctgcctttgtccttgctacctctcaggtgaggcctgacacccttggccatgatctgaacatccccacgttctcagctctctcatggctatttgctgatgctgcaatgacatcccagccctctttccccaggcccaagctggatggctacagcatgattatggccatctttctgtctataagaaatccatatggaaccacattgtccacaagtttgtcattggccacttaaaggtaagtttgggggttaagggtgatttgtcagtaagtaaatcacttgggaagacctgagtttgatacccagaacacatgtaaaagtgctggttatggtgtcacatgcttgtaatcccagcactggggaggcagagacaggaggattcctagggctcaccagccaggtggtgtgaactacttgctgagctccaagccagtgcgaggctctgtttcaaaggagatggacagtgttcctgaggatgccacctaagacttcccagcctcctcgtgggtatgcacacgtgtacagcctcccctcaaacatgcagacacatgtgtactcacattgaaaatgggaggctggaggatggagggttctgtcaccagcctgggtgaccacccaccccattagattaattctctgtaaatgggaaatatcctaagttaaaaacttatgtaattcccctaatctaccaaacctcacagtttaacaacaaaaggcaatgtaaggtgttggttgtttaatgatctgtggcttgctgccatacaatcaaaagccattgtaagtcaagaattgtaaatcaactctactgtcattctagaaagtaacatcaaaatgtttaatacttaactaaaccaaaagactgaagttgtttaaaatggagcagtgagttggttctgttcagatgaggccgtggcccaggtagaggagttacagccaagtgagtctataaagccaagcctgccagtgaccttgagctgatctgataggtgttacctcaacttgggaaagcatttcttgccaactggactcagcgctaaaacaaagtaccagatgcaaacagtgtaagagaggaaggacttccttcagtgacttatggtttcagaagtgtcactccacagtcctcagctctgttaattctgagcccggagtgaggcagagtaccctgctggtaggagcatgtggcagatgctgcttaagacaagcatggggaagaaagggaccagacacaaccctcaaaggtgccgtcgtgtcctcccaccccaccccatccattgatctacttcttcaatctcaagttcttaccatctactaaaataatgccattggcgtgggtctgaggggtcaccctgcaagttcatggagatgtgccattctcacaccatagcatactctctcaaacaaaccccactgtctcccatagtccattccaattgcatatagttgctttctcagaaaagctaggtccccagacttctaccctactgtcttcggctggagaagagccctatgcccaggttaaatatctctgctctgtggccatgaccccactgcacccttggtttgctattggattggattgtgagtgagccagcaatgatctgctcagcagttcccagctagcagtttacctcgccctgagcctcaaagggcggggaacctggactcttcttacccttagagggtatcaacacaagggctttgttgcattttgcactgtcctctgtggcctaaaatcctcctctgtgtaggaaagaaacattttacctactacccctgttttccccatgccatgaacaaagatggactgtgtcctatttccagtttctggcaggggcttgaaggccttttccaccccaaggccttaagtccttgaaggctcatagcttgaaacacagctcttacatcagacagacaaggacaggacagagggctataaagcatttgcttgtgaaattggaattcggggggctggggatgtagctcagttggtagagtgtttgctgagcatcttgaagccctgggctctctctctctctctctctctctctctctctctctctctctctctctctctctctctctctcatttttttagacatagtctctcactatatagccctaactgacctacacttccccatatagatcaggctggcctcaaattcacagaggtccacctgcctctgcctcctgagttctaggattaaaggcacacactaccatgcctgactgatatatcatcctttaaatgatcaagcctttaactctagaacaccaaaagataaattgctcaaaaattgaaaggtctgttaaaattattttaaatataaattatttatatcaaaatgaaatgtattatgcctttcccttattaagaaaaaaaaaaaaactttgtggctgtggggattgaacttggggccttgacacattcgaggtaagtgctctaccaccaagctacaactccagccctttcattatactttcatttcaatgtaagataatgtaattaaaaataattaagtagggcaagctcagaaaatgtctcacttgaaaaaaaaaaaaaaagataagccccaaagtagattttgaaagtattatagatgcatttgctagggtgtacactttttctcttgaccccagctgtaatctgccaacccatctcttctggctactattgtgctttggagtactcttccagatgtggtggcacactgtgacccagtcctagtgtttgggaggccaaagcagtgtgagctcagcttggcctcggataagctcattgtctcttggctcaccacggcctcccctgggcccagcccagcaactggcttggagcagacaccattcagcccttattccgagaatacagactccccagacagatttggcttcactgtgctgtggaggagagatggatgaaggctaagtaggactttgcctgatgaagaagaatgagagggacttaaggcagggctgatggcatgaacagccaaaatatcatggtgtctggtcccaagtccagggagggactatgtaccccaccttgatgaccctcattcctccttccactaatatctctaggttggtgggctgtcagctggcttgcttattacatacttggctcctcagtgtctttgtgtcagggacttttccgtctgatgcttctcttgggaattttgttccttttgacttcggatgccagtgtgtcccttgactccttagacctgggagacctgacatgctgctttttgctgggaggggttttgaaacctgatgcctacaagagaccagaggtcactgcaaagcccacagctgttgttactattcccacccatgccgtcagtgttcagaagctgggtctggatccaaaacactccccatgtgagaagcctgttttgagcaaatagacctttttgcagatggtcagaccctaccaaagcgtagaaccagctatctatcagtcaatgttttacctgctcctaaagggacagaaaagacttgggctacctggccgctgtgttgagtgacatacctctgaagaaggctttgagaactggtggcatagcagcctgtggcagtcaaataaatacataagtctcctttctgtgcttcctgtattgtgggaccaggatgccatcgaaatgttggctcctcctgactgtccccagctttcactgaaggggactcatggcaggcaagcagcactatatcaactgagattcattctgtgaaaatttgggagtccccctcccctccccccaccactgccattctcaactgattttctttttctttctttcttttttttttgtaggcttatattatttttttcagcatatgcaatttgtacaaaatattagatttcatcagggcattttcacccaagtgtactttttcaccctttaccagcccctcttatctcctaaccccctcatgctggttctcactccttcccgatggcctcacttctaccttcatgtctttatttttaaatctagagtccctgtctgagagaaaaatgggtggcaattgtctttctgagtcaggcttgtttcacttaatgtgacctccagttctgttccttttcctgcaaatgtcataatttcattcttcatggccaaatcatattctgttggatatgtatgtatgtttgtatgtatatgtatatgtatatgtatatgcaaatgctttctctctgtccatgcattgacaggtacctgggcagattccatgactcagctcttattgtttgtttgtttgcttatattagtgtgatgggtcaccagcatagctgaagttgaccttgaactcctgatcctcctgcctctacctctcaagtgctggaattacaggtgtgagccactatgtccaggagagttagatgttcttagtagagcttcaataaacatgagtatcatgtactgacttagagtctgtctgttatgtgtcccaagagtggcagagttgtatcatgaagtagtttttgttttttgaggaacccttgtactgtttgccatattagccggactaatctacatccccactggcagtgactaaggtcctacctcccaaacacacacatatctgtctgcagcagcatttgtcctttgttttcttgatggtgactgttttgactgggatgggatggagtctcagtgtggtgatttgcatttcctttgttgctaaggatgatgagtgttttttgttttttgttttttaatagactatttgtacttgcttctcaggcaacagcctcataaattcatctctctatttattgaatgggttactcattctcttagtgtctcattgtagcctttttatgtattcttcccctgtcaataaatagctggcaaagcttgtctcccttctgtctcgccactggctgctgtttcctttcaattcagtgccatcacactttttgattcttgctacaatctgtcagaaaatggctgcctggcatgcctataccttgaagtgcttccttttattttcctctggtagtttcaggtgttacacgaaggcctttgatccatgggaaaaacttaaataaaatagtggttttgagatattatatacacagagagctgtttgcccctttaaagtgaacacttgcagtaactgggggaatgttcacagattatacatctggagcacaattttagagcatattcatcaccctgaataggttctcacacatctccagccacctctccagtatcccaacctgtttcctcagcactgctgactcctgtccctggttggacaccaactttcttctgccgggctttacaactgtgagatcatgaatgagccatgggatttctggctttttggttgttattttattggcttctttcacttggtgtggtggttctaggttcacccatgctcatatcatgtgttagtggctcattcttttctagcgaaagcttttaaaaatttctttatgaatttattatttagggaaaagagatgccacagcatatatgtagaagtcagaggacaactttcaagagtcggttctctacttctaccatctgagtcccagggatcgaactcaggtcatcaggttttgtgggaggcacctttaatcacggaaccatcttactggcccagtccattcctttttgtggtttagttaaaccattccattgtatggataccacattgtattttcagttgatggacatttgagttgtttctgtcctggttatttttgagaattctgctttgagtgtgagcgtgtgtgtgtgtgtgtgtgtgtgtgtgtgtatcaaaatttctcagtacctcaagagagaaactgctggtcccctggtagaaatactttgaagccctttcccattgctcagtactgggaaactgaggctagagaagttacttgacttcttttaaaactggccagtactctgtgttcagaagtggcagggctatgtctgatttccagggactccaggcatgagcccctatgtgatggagaagttggatctttgtgttggagataccaaggacctggttgccagcaaggtccgtcactggcaagaccaagggcgcactgacctttgtggctcacctagctcctctcccctttcagggtgcctccgccaactggtggaatcatcgccatttccagcaccatgcaaagcccaacatcttccacaaggacccggacataaagagcctgcacgtgtttgtccttggcgagtggcagcccctcgaggtatgagtgaggggatggcattggttaggaggtgtcatgggaagaaggagtcctgtggggtcagcattcagccaagacatcagtaccttctgccacccagaaccctttcctagtcaccctgaggtatcccagctatgacctatacagagtggctttccttgggagtactggacacagagcctcaggaacaggctcagtatgtccgtccctcctgccccacaggaaactgggtcaagtttttcaggaaaatagaattgtaggcctccaggatggtccagtaggccagcccgtgcacaggagacgttatctggggaacagcagcctgttcaagctgccctcaacagcagatgagaaagcaagactcagacagaagacaggaagtagtaggagggtcttgtcagtcaccagttagtccaggataagccttcagatctttgctaggacacatccttctatttgaccacaattattttactatcatttcttaaaattataaacataggatatatttggtacgaacattgaaatagtatagaaatgtatattcagtgtcttatctttgtcacctcttggcctcaagctttatgtacccaataataaccattgttaatgagaagccagataaccttctaagtgtctggtactaagctccgtctcaggctctcaatatcatctgtgtgtatatgaacatgtgtcttagtcagagcttctatctctctgaggagactccgtggccatggcaactcttataaggaaagcatttaattggggctggcttacagttgagaagtttagtccattatcatcatggcaagaagcttggcagtgtgcagacagacatgctgctggagagggcaacaggaagtaaactgactcgaacttctgagacatcaaagcctgcccccagaaacacacttcctccaacaaggccacatgcactatctgtagggctattcctgttcaaaccaccacaacatgcatatatctttttcttcaaaaacaaaactagaggtaaagtatgccttctattctgaagctcgctacttctgatgtggaccttgttccaggagttcaagggggttggtggcatttctcctggggactgcgtggtcttccattttattcatatattccagcatgatgcacactatttcatataagaaatttttgtgctgctgatcttaatttccctctttgggtgagtgtagggatttaatctcatccatgttcagcacatgttctatctaccactgagccctaagttttctcctgtgattctgtacccacagccactcatttttcttttaataaaagcacacccaaccaggcatggtgatgatgtcagaactctggaaatagaggcaggaggatttcaaatgcttaatttggttcagataatgagatttttgtcaaaaacaaaataaaggaccgtgaggtggctcagtgggtaaaggtgcttgctgccaagcctgacaaccagagtttgatccctgagccccacatgatgatggaaggagaaaattaaatcccttaaactgtcctttgacctctgcaagtgcactatgtactgtggcgtgcacacacacacacacacacacacacacacacacacacacactcacatgtgtgcgtgcacacaaagaaatgggggaaattcaaagaaaactaattttaaaaaagtaaaatagggttgtagaagtaactcagcagctaagaatactggttgcttttttagaggacccaggtttggttcccagcacctacatatggcagcttacaaccatcagtaactctagtctcaggggatccagcaccctgtccggcctctccaggtgtgcaaatagtgcacagacatacacacaggcaaaatgtccaaacacattgcataaatgaaacaaggcacccttgatttaaagaatttaaagaatgtgctcaatctaggcatggctgtatacgcctctaatctcaagacattaagaaactaactgagagaggggaattactgtgagttcgaggccagcctgttctacataccaagaagtgtctttttaaaagggggtggttattctataattttcaaaaagtagagcctctatattagggtttaattttgcaaaaaggaaggaagagaaagaaagctgtccatgttggtatcttggaaatatactgagggtgggcctaagtcaaactgtgggtatagctcagtggcagagatcctgccccaaatgctcaaggccttgggttcagtcccaacatagtgatggaaaatcacagtgctgggcaaagcagagccctcagtaggtagttatgggagaatgcaaacttgccctcagtagacacggtcatagaagaaggagtttcctggctgtgttggcatccaaggtttgtaacatagacaagggagagcctgttcccctcagttctgatttgcattcctgtgtgacacagatgcacaggacatcagccacagttctgaactttggctaggcagggatttcattttctgcccaacacctgtctttgtttctcttctaggaaatggcttgttagctttggttagaagtgtttgatagcagtttgatagcagctacccagaagccttttgatagtgaggacaaaggcttcctgaacgcctgtagtaaagctgttagctgttctcacagatggtcccaagtccctaacaaacaaaggaaatccaggctcatcagctctgcagatcagctgcacagtagctgacaaattccgtcccatctcacttctcaaatgctggatggctttgggagggaggcagtaggagtctgcagtggcatttgaagatggaggccatcacagcatcacagtgtcctcggaaagtctctcttgggcattcaggtgttgacaaggaaaacaccgtgtttcctgggttcctggttgaactgtgtgtgagtgttcaagagactatgctgatctgaagggagccctggttctacttggggtgactgcaagtccagcacatctcaatagagtcccaaatggctatgcctcaggggcttgagcttccatcccaggctccagagctgatgcctgccaaggcctttatctcaggtgtggaccagaaagaagggcatttgagtcacagaaatattaagagaagtcttaaaacctcctggtcatatttatgacttggggggggggtgttgatttgttttatgtggcaatgtgcattcaacttctctcctgggtgttcttttcagtttaggacagttctccacacgtagtattttcagtgttttactttacagcttcatatctcaacttttagttggggtggagtgtagaggggaacgccaaaaccgttttttacactgatacatttaatttgtatgagaactactctaaagtcagtcaatatcctcaggcactaaagggctatattgcccttcccaacccaccagtgcgctctcctacccccagtgtctactctagacagttgattctccctcgggattgctggctgtgtgacctgctttatagaatacctcatgcatgctcctttttacatgtgcgttgtgccctttaacatcagggtttctccagtactcaggaaacagttggtggctgcctcattgtgcccagatagtgtcccctgaggcctcttcatggttctagcttttcctttggttcacctgccctgggaagtcaatcagtcaatcatacatactcttacaagtaaggaggccaatgccttctctctactggcaccacttcgttattactgcttggggtttcagcactgggtgggaactctcaacctaattaaactttggtataagcaataatcttgtttgccacccttccctgttgccatgtcactaactccgtagtgtagtcaatatattctcagaagtggcagtgctccagccttccctcctgagggcttcctcctctactcatctggtaagcacccctgctttctacataacttcctgcttccagcagaaactttagtccccacctccccaccccaccccacccccgctcctaggacatatttggccctcttcttgggtgggcatctagcatcctggcggtgtctgctatggccacgtcgctcattgctctgtgtgtaagtgtgtgagttcccagaggcagcaactgacctttcagcaactcctgccaaaccacccctcagctctagacagacagggaaggcccttgttattcctcagacactccgtttcaagcctgaaaggtccttttacgtgaccttgccgggtgtctgatgtatcatttatttttcttcttgctgctacaaaatgcccgacaggaagccacttaaagaaggaagggtttattgggatttggagataaaggcaagacattccatcgtggtaggggcagtgtgatggcaggagcaggaagctggctagtcactgcatctgcagttgggaacagatgagtgtcatgctcggcttgctttctcctttttatcgagtctaggagtccagctagtggagtcatgctgtctgctgttagagtaggtcttcccacctcagctatcccaacgtttataaccctcacaggcattcccagagacttgattctcaggtgagtctacagcctgtcaagttgataatcagtattgactatcacagtgccgtctcttaacacccaaacacatcgctgttatgctataaccttcccctgctgatcctgtggtcttacggcatctcactgtgcaaaatgcattcagtgcaacttcagcagtctctattgtctttaaaagttccagtcctgttcacaagtggaaatgcagaagctggttagggtcaattgctcctctcccagaagacccaacttcagttccactagcagagttcagatcctagcaaaccatgttgggcagctcacgactgtttgtcactccagctccaggggatctgataccctccggcttccatgggcaccttcactcacacatgtgcacaaacacatgtgcttttttttgtttttgtttttgtttttctttcttacaggctcttaactcttttttaaaaaaatatttattatgtatatagtgttcagcctgcacgtatccctgcataacagaagagggcgccagatctcattctagatggctgtgagccaccatgtggttgctgggaattgaactcaggacctctggaagagcagtcagtgctcttaacctctgagccatctccccagccccgaaaatacaacttttaaaaaagcctaagtgcgcagcctcttcggagactcgggcagcctcttcactgtgagctcctgtaacactgaagcccatgttccgtactcccagtatgcatggcacagagtaaacattcacttccctaaaggatgggcatggcaaccaaagcaggactgatacccagcatggcaaacagccaaatctaaagctccgtttgtaggattgtggtagaatcagctgggctccgaagggcatagggagccttgcgcctgcagcagtgcggcccacacacctctagcctctctcttgagctggctccatcttgtcgatgcagttttctttggagggtatcccatgattctggaatctctaacgtgatggaggaggaggtgtcttcaggtggttgtgagctaccatgtgggttctgggaatcaaactcgggtcctctggaaaagcagccagtactcttaactgcagaactatctctacagatctcagggtctctctttcaaatggaattacatttcacaagttggagcctttgataggtgaggccttgccttcaggacacctttcttgttatgaaaatgaagaactggaggttccccttcagcagtctcaacttccgttggttgttagtcacagcctctgttaacagtcacagcctctgttaacagtcacagtcacagcctctgttaacagtcacagtcacagcctctgttaacagtcacagcctctgttaacagtcacagtgttaacagtcacagcctctgttaacagtcacagcccctgttaacagtcacagcccctgttaacagtcacagtgttaacagtcacagcctctgttaacagtcacagtcacagcctctgttaacagtcacagcccctgttaacagtcacagcccctgttaacagtcacagcccctgttaacagtcacagcccctgttaacagtcacagtcacagcccctgttaacagtcacagcctctgttaacagtcacagcccctgttaacagtcacagcccctgttaacagtcacagtcacagcctgttaacagtcacagcctctgttaacagtcacagcccctgttaacagtcacagcccctgttaacagtcacagtcacagcccctgttaacagtcacagcctctgttaacagtcacagcccctgttaacagtcacagcccctgttaacagtcacagtcacagcccctgttaacagtcacaacccctgttaacagtcacaacccctgttaacagtcacagacacagcccctgttaacagccacagcccctgttaacagtcacagcccctgttaacagtcacagcccctgttaacagtcacagcccctgttaacagtcacagtcacagcccctgttaacagtcacagcctctgttaacagtcacagcccctgttaacagtcacagcccctgttaacagtcacagtgttaacagtcacagcccctgttaacagtcacagcacagcccctgttaacagtcacagcctctgttaacagtcacagcccctgttaacagtcacagcccctgttaacagtcacagcccctgttaacagtcacagcccctgttaacagtcacagtcacagcccctgttaacagtcacagcctctgttaacagtcacagcccctgttaacagtcacagcccctgttaacagtcacagcccctgttaacagtcacagcccctgttaacagtcacagtcacagcccctgttaacagtcacagcctctgttaacagtcacagtcacagcctctgttaacagtcacagcccctgttaacagtcacagcccctgttaacagtcacagcccctgttaacagtcacagcctctgttaacagtcacagcccctgttaacagtcacagcccctgttaacagtcaaagcccctgttaacactcacagcctctgttaacagtcacagcccctgttatcacagcctctgttaacagtcacagcctctgttaacagtcacagcccctgttaacagtcacagcctctgttaacagtcacagtcacagcctctgttaacagtcacagcctctgttaacagtcacagcctctgttaacagtcacagcctctgttaatagtcacagtcacagcctctgtttacagtgacagccacccctgttaacagtcacagtcacaacttctgttttagctcaagctttggctacaactttttatttgtttgagctcttttctttaacaacctgcacatttttaatctttgccctcccatgtccctcttttccatgtggatctggataagaactgttccacagacagctgctcctctgccttgagatttcctccaccaaacacattaatcaatccattgctttaaattcagcctcattgaagttctcaggaaaagggaagtttctttgccagaataccacactagcagcctctagcctagttcctgaaagagtccttgtccccttctgaaacctcctgagccagccctcccagccatgagcctctcagtcttctgatcttccaaacttgatgcagtaagccagtaagccctttttacagcattttagggcttcttaagcttacagctgcaaactcttccacattcctcccacaagccagtcccaagcactaccaaccacacaatggccatgcttcttggtaccagttctatatattagttttctcattgttgagacaaaaaaacctaacaagaagccacttaaggaagaaaggacttattctgacttagaggtccaggggagtcattccattatggtagagaaggaaggcatggtggaaggaacaggaggctggctgctcacattgcatccacagtcatgaagtggaggtgaatgctagtgttcagtttgctttctgttttatattctgtccaagaccacagcctaagaaatggtaccacccataagtaaagtgggtgttccacctcaattaccctaatctaaatattccctcacagacaaacccagaaggcttatctcctagtggttctagatcttgtcaagttggcaatcattactaactgtcacatctggcctgtggtggagaagctggtcacactggccaccagagctggttgcacttcccgctccctgccctttgtgggttccacatctgtggtcttcagctgttccagttcagtgagagctcagcatgtgctgccatctccatttttgggctctggccacaagagattagttagtgaaagtgtcatttgtcttcctggtccttcccttctaattgtgctgtctccccagcttctttcctgtgtgggagaggagaggagcaggaacccctgctccccatactttggtccccagcacctcccagctggaaggaagagtaagttgctgagtgagttgtttgtagacctgcaccccaaggagtatctaccaggtgtgcaaaacaccatttactccttatttaacctgtgaggcaggacctgccatcaatctttatgtaactagaaccactaaggcagaaagaaaatgacatactcaaagtcaaggtagagctgccatccaggccaccagcttgccagccttggaaatgcctctgttggtaagtccagctttctgaaacgaagccacatgttcaccctcctagctcggagctttccaaaactccttctccatcctttccttgatcacatgacttaacaagctctgggccaagtaaaacaagctggcaagtcatcaaagggccgggcctggtgtccctaagaccacagtttgtgctttgtgagtgtacctgtttcttcctcattgctttgactgaaaacctgacaagaagcaacttagaggaggggagtggaatttctttggctttccgttcgaggggattcagtccatcggggtggagaaccagtcaggaatcagggagagatgaatgctggtactcagcttactttcctttttattcagtttaagaccttaacgcatgtcatggtgccaccttgatatggtgcgttcaagatggggtttgcaacctcaatgaactcaaatctagaatcaccaggaagttgataatcaatattaaccatccgaatgagctttggataagagaggtggtttggccaaatgctaacatccctttgtagctgtcctttcagaggctatggagttggaaacagacatgcagagctgtgtcaacatgtcactttgtgcatatagatgttactataaatgacactctgctcaccatcccataggcctttgtatctgcttcatccactggactcttagaaccgctatgaagtatacatcatacctccactgtgcagcaaggaacccaaaggttagggaggttaagcactttggtttaatggagaattgtttccaaatgtgagtccctgcatccccaagactgggcatccatagaggctaattctgagacctgccactgtctggggtgtcctggtggtgtcctggggtatcggtgggtcattctgggatgttgaaaagtgcatgtatgagccaacaatgcttaccagctggagatagcccaacagactcagttatccctctcagtgaccataaaccagtgaaagcagtacttgctatacaaccttcaaatggtccccctggtgaccctctcccatggtcttctaaagggaccttctggcctctactgacctgaagattgtccttggtgttcagtctctgtattgctatgatcaaacaccatgaccaaaagcaaattggggaggaaagggtttattctggttacacctccacatcatagtccatcactgaagaaagtcaggacaggaacttaagttggggcaggaacctggaggcaggagctgatgcagaggccatagaggaactctgcttctcggcttactccccatggcttgttcagcctgctttcttatagaacccaggaccacctgcccaggggaccccacccacaataggcatcaatcactaagaaaatgccctgctggcttgcctataatctgatcttactgaggcatttttttcagttgaggctccctcctctccagtgacttagtgtcattgtcataaaaacagccagcacagtctcaagaaggaacagataaaggccagcagccagggctgagaagcctgcactcagagtttgggtctgggtgttggttctctggctcctgggaagaggtcagagcaggacccagggcctgtcctcatgtccccctaggctgctgctctccccactcactgggcaccttagggggcgtgtatctcttttccctctgtgcctacttttcacatcccctccctttactgggaaactatcaaaggcccctctgaggattccctcgctctgacctctccaaggccaacctcaggcctgattctaatgacagactgcatgtacacgacatactttctgggaatgtgtggagtccttgccaagacacaggaggctgcaaggaacaaagggatcatttctggttgtccttcagcaggcatgtgaccatagccactggcaccaagacacatgttctggggacaggctggactttgttcccacccacaccccttccttgtaggagcccatgggcctctgtgattttgacacacactttccattctgtgttctcacttggaggacaggggtgtcaagcctaggagacacccaagttttcttccatctgtaacttattttgctttcccaacccccaaaagtgtttgaggagtgtgacttaaattttggatctggagagagaagggtggcattgtcctggtgtcagtgtgtctttacatcaaagttcccattggcaccacttaacaaccaataacttggaagccaaaacatgctcagagagacctagggacctagagacctagagacctagggcaagaagcagcatctaataagtatctattgactccaagcacaggcttacactccccccactcccccctcaccaccccagtccagtattgtaagcaaaaagaacaggtgctccttgatccatggcagtgttgggtggaccgctccctagaagtcaggccctggaattaaagggtgtctgctgcttctgcttctattttatttcatgcatattttattttatgtatataactgttttgtgtttgtgcacctcctgagtgtatggtgcccatagaggtcaggagagggcattggatcccctggaactggagttatagatggttgtgagtcaccatgttggtgctgggaaccaggcctgggtcttctaaaacaaagagtgctcttaacacataggccatctctccagccctgcagggactctttttctgtctagatggcttcctcatgcatcaagagccgctggggaaagaggttagtctttagaaatgactatgagatttcaagaatagatgttcccaggatgatgactgttaaggattcctgggctttgtttggcttctcttagctgctaatagtctccaaggagtgcccccattgagacctgggagcctctgtcattcccagaagggtagaaacagtcccagaagctccctgtggggtacctaggcttatgaaagcttttttattgttcatctccaagttggcccaagggctaggagtgtagcttagtggcagaggacttggttaacatggattaagccctggagtccatcaccaacactcccaacaaaactacaagagggagaaaaaaaaaaagacaaacagcaggcccacttctcatggccttggactgtgattgactctgagcctgaacttcagccaccaacctgcaaattggcctgggatttgggcctcacagtgctggcagggatgaaggtattctaaagagaaatttatgcccactccctttggctctcagactattgaacaatagcccctaagaaattggaaattacccaggaattgcatgctgggagaagggaaagtctgaagcctggtgccagctgggaaagagcttgtctcccagagagagctcacacaattctgagaacttgtcagaccaccttgcaggaacgactggaacagagacaaagatgcatcagtgatggtcggggccacactttgaccaaaccctcttagttatatattcctctagcttttggtttaaatcaaaacctcgttttaggatcccaacgatggacaggggtatggtgtagtgtggttcactggacctcttcattttttctttacaatgtgacttcactgactaaatttcccttctctgtttttttccattaacacatttctttaattggtccattgcagacaggtgagtgagcataactcaccaggtctgaccctaactccagtaaaaacagtggcatgtgcagtcaggccccagcaaactggcagctgctagctttgttgggcccagatacagacaggtgggagagggatgaggtctctgcttaggagggtggtgaataaagcgggggtacggaggctcatgttcaccctctctcctctctctcctctcctcagtatggcaagaagaagctgaaatacctgccctacaaccaccagcatgaatacttcttcctgagtgagtttgagggctagagatccccaaccccgtgggttcatctgtcccatttcctcccataccctttcaaactggcagagtgacagcacacctattcaaaagaagggtgccagcagccagcttgtgcaaacacctctggacctgttaccttcatctagactcccaggcacctgactgttgagctgccctgcaggtggtgtcgagctggctccttcacctctgacaggccgtctgttctctctacagttggacctccgctgctcatccctatgtacttccagtaccagatcatcatgaccatgatcagccgcagggactgggtggtaagtcaagtggcactgctggtggtgggtgagtgtgaccgggatgctttgcccctggtgccgctgggggcctgcaaatccccagacatctctcccaaagcatagctgctttgtcactcttaggaagagactgtctttgaggccaccagagccaagaaagtcaagaaggccaaagcatggccattctaaagacacctccagtacatgcgagaagtctattccttccaccccaccagtagtatacaagatgctattcttagaaggtaaattccagcactcctgaggcataggcagacagatcctctgtgagttcaaggccaggtcaccggtgtacttaagaatttaatctggcatatatacacaggagtccacctggcagtaattgccctagcctagtagtcccttagaaagtccccagcggcaatgtgatgagaggctgacacagcccactggaagtggcctcaacaatggaaatatgttttctcattccctggagaccagaagtctaaaatcagttgacagcagcctggggggtgggggtaggagggtccagacccctctccttgactggaagatttgtctgtatgtcatcttccttctaggcctatctgtatctgtggtcaggtgttcccctatttttctaatgtgtatttgtgtgtgtgtataggtacatgtatgtgtgagggcgtccttgcacgtgtgtgtatatggaggccaaatgacaactgtctgagttactcttctgttgctaagatgccatgaccaaggtgacttctaaaaggaaaagtttattgggggattagagtttcagagggtgagagtctgtgaccatcatggagcatggcagcaggcaggcatggcactggagcggtagctaagagctcatacattgaaacacagctacgaagcagaatgctaattggacaagatgtgaacttttgaagcctcaaaacccattcccaatgacacacctccttcaacaaggccacacttcctaatccttcccaaatagttccaccaactaggaagcaagcattcaaatatatgagcttctgcaggagcattctcactcaaaccaccacagaaacctcaggtatcacttcctttgaggcaaggtctctcactgccccggagattacagattaggctagaccatccagaaagctccaggatctggcttactctacctccccagcaccaggattacatgtgcccagcttttgtctgtaggctttgggcattagagttgcaagcactttaccgaatgagctgtaccactaaccttgttcctttcttataggatgacactagttgtgttgatttgcacccattggaatgatcttgctgtcttcatgagttctattagcaaggtctttagtgacggccaaggacattgactttagaggtgctggggtcagaatgtcagtgtatgagtttggaagggtgttagagttttctaaaagaacagaactgataaaatgaatacacacacacacacacacacacacacattgattaccagagtggcttataagcagcgttagagtagcacaatggctgtctcctgacagaaaagccaagaatctcgtaattgttcagctcatgagactggatgtctcagcagtcccagtttggtgctggagtcccagagagacttcctagaaagtagattctaacatcagtgaaggaatgcctcagcaaaaggataggtgagcttgccatcaaaagtgagggcaagccgggcattggtggcatacacctttaatcccagcactcaggaggcagaggcaggtgaagccagcctggtttacagagagagttccaagacaggctccaaagcaatacagagaaaccaagtgagggcaagcaggcaaaaagcaaaagcttccttcttctgtgattctattagttgattctagacgtagtcaagttgaccaaaattagccatcacagaggacatgtttctacccaaaacaacaggcttggaggtaccttcagggaagcaggctgtgtttgctctggcaagcttgggtttacatagaaatacagttgtgatttttgtacgagtacctacccacagcattgtaagctctaagtagtagtcaccacaagcaaagagttagctgtgatggaaacatggttcctgccctcaggagagatcagaaaagtgcatggcccgttagtgtgtgttcttagccttttaaagtcacatgagtagctggatgtggtggcacaggcctttaatcccagcactctgggaggaagaggcaggaggatcactgtgagtttgaagctagcctggtttaataatgagtgccaggccagccagggttacaagataagactgtctgaaaataaaacaagcgacaacgacaaaacaaaaacaaacaaacaaacaaaacccatatcgtcagtgaaaacaactacaaagtttcacaatgagaaatactgagactgaaattttgtgccttgcccaatatgacatcaagggatacagtgaactccagatgccacatccttgtgccttctccacaccaaaccacctctgcgtgtgcgcgcatgcacgtgtgtgtgtgtgtgtgtgtgtgtgtgtgtgtgtgtgtgtgtgtgtgtgtgtcccatatcctacacatatgtacagctactacatgtatgtgtatgtgcatgttttgtgctgtcataagcattgcagttactatttgcccttgcttgtggtggccaggtgacaaccttggtgtcatccataggaacgccatctactgcctttgagacagggtctggagctcactaagtatgccagactggctgccagagagccccagcaatcttcctgatcctgtctcctcaatgctgggattctaagcacacaccaccattcatgcaccattcatgttctgggggatcaaactcaggtcctcagttgtgagacaatgagccatctctatatccctagatctattttttgtgttgtttgttccacaaaggacaaagcattaactagaaagagcaggaagggaaatcaagccacgtccctcaagagcatcctcgggtagagctgcggggaatctgacagaacccctggccttgcatccagagcagctgtctccaggtcctgggcagttccactgggccattgtcagtatctggagacatttatgatgatcagatttagcagtgggaagatgatgctagcccagcatctagccaagaggggtgataaacatcccacaaagcatagaagccccatggtgaagaagcatgctgtccatcttgttgtggcacatactgtgaggactgagagaccctagccttgagggtggagatgggaagccctaagagtaggaaagactgctcatgatgcagcatgggcacccacaccaccgcctgggatactttccagaccccattttcctggaactgattatccatggctacttgccttggtagtctccctgttgttttccaagccttcacttctcaggctctccatacatttatttatttacttacttaattttgaaataggtccttactacattgcccaaactagccttgaactcacaatcttcctgcttctacttcccaagccatgcctggctgtacctctctctctctctctctctctctctctctctctctgtgtgtgtgtgtgtgtgtgtgtgtgtgtgtgtgtgtgtgcgcgcgtgcatgttccataccctatgtatatgcacacacatatacatactcatacactccatttatgcactaaattaacatggggctggagattggctcagtggcagagtacttgcctagcattcttgagaccctgagttcaaacacagcccagggaaaaaaaaaaaaaaagaaaggatgatcaaagtgcttgctgtgcctgctcctcttgatctcttgccacatctgagcatcttgtctccagccactcctaactgttgcatctgttcttttctgccctcctgagctgtccatcccctttccaacttagctgacagcactctgaaaatctggaatggccctaaggaccaacctcaattccttgcaaccaagaaagcacggtctagggccacccttgttctctaaatcattctggaatctgccatgtctttgtcatcaatgtggtcctggttttgttctccattttgttcctgaactaagacaccaacgtgccagattctattgtcatttcaagacctctggtttggtttttgttttgtctgcatgagtatctgtgcattgcctggtgcccacaggggccagaagaggacatcagttcacctggaactagggttacaatggatgcctgtgagcctttgtatgggttctgggaatcgagcctgtaacctctggaagagtagccagtgcttttatccagtggaccacctctccagcctctctttggggttttcccactgcctcggagtggctggtccttgatgaaataaccttctgataagcattggctgggcatgagcattcctgacggcaaacagtttgtgcaaaggtcctgaaggagccgggtcagggtgcttaggcaaaggggcttctggatcctgcagagctccatggtcacttggattacgtggcggtgtgtgtgtgtgtgtgtgtgtgtgtgtgtgtgtgtgtgtgtgtgtgtgtgtgtgtgtgtgtctgtctgtctgtctgtctgtctgtcttatagcagagttggatatgcttggagcacaagtcattggttgccctggatacatgaggaatgtcagcaggagagcaaagggaggctcttgctgtggtccagccaagtcacggggcttgagtggcagaggaagtggagagacatggatttctctgcagaatgactgcttgagagcctgtgacagaggacagaggcttcccaggagagagatgcaagcttaggaccttgctaccaatcccaaggagggacagacaaagcgatgaggagagaggacccaagaagagagtccaacctgaaaagcgacctgggtctgggttgcagggaggggtggtgtgtctccgggccctttcccttctaagaaaggaaggaaatccaggtgcctgagcaggggcaaggctgagaatggacagccacttgatcacatgttgggggctcacatgacaatcatctggacctactggctacctcctagccaatatcccatttcctccctgaaactcaccaatgcaaaccccatgcaagcaggtggtttaggcaagtgtctgaccttgtatggccctgcgtcccaacttcctagcagcctgctgtggtttcttctgaacacctgtgccaatcagtgtgagctgtgtatatacacagctcggtggttaggtaaaccatgccaagaagagtggggcaacttaagtttaatcttgtttcccctacaggacttggcctgggccatcagctactatgtgcgtttcttctacacctacatccctttctatggcatcctgggagccctggttttcctcaacttcatcaggtaccccagctttgctggcttaccctgtgcatttgagaacactgactttgatggggctgtaatgtgagccctgtgcctgccgtggggtagggtagttacagagggtctgtttctgtgtggctgcctgtcccccatcctgaggcttcagcactgagctgcaccatcttctaggttcctggagagccactggtttgtgtgggtcacacagatgaaccacatcgtcatggagattgatcttgatcactaccgggactggttcagcagccaggtgagggaaagcaaaggcagtcacagggaccctgcaaagcctggaccccactgtcggagccttcacccagatttggctgcctcagtggatccagggctatgctgggcttccttagggctgcttgtagcctcttggcagcctcagggttaagcaagaaagggtggtgggaagattagggatgtcgctcagttggtgctggtctagcatgcatacaatcctgggtttgatctgtggcatccaataaacccatgtggtggcccatacctataatcttagtacttgggaagtggaaagaaggatcaggagtccaaggcaagactgagttaaaaaaaaacaacacacaagaagatatggaagggatggtaggaatcttccagaggatcctcgaggaatctgggtgggctgaggctcccaggtaaaatagtctgacctagagaggtgcccctgagaccctgggtaaggtgacctttatgaagcaagtctaggttctttggtttccttcttacccccagccacttattccctgtcccctctgcagctggcagccacctgcaatgtggaacagtccttcttcaatgactggttcagcgggcacctcaacttccagatcgagcaccagtgagtgtggcccagcaagcctgggggagagggtagacgaggaatgggggtacagtggtcaccacccccaggccaagggtgccatgcagttctatcttctcttgttggcaaggccactacctaacccacctgagaacacggttgggcaggagaggggctctgggatcagcacgtcctgaggcattgttatccaggccccatgccatgtggccatcctggggactgtactccttcatgtgtggccactttgcagatacagaaagcttgcaagaccatctcacagtcctgcaatgctcccagcgccgagaaactcactccaggttaattgactaggaaactgaggacctgctagatagcctatgtggtgcgtgggtagctaacggactgtccctagtgcatctgcctctgtctcatcttttattattcttcccatcttacctcccatctgtctctttcatttcctgtttttaaagctgggagttgaatttacaggtcttctgccttgtcctcccaaatgatgagaccacaggtgtgagccttcacactcagattggtttctttctctttttaaaaaaaaacacgagtcccttgtgtctggctatgcgataccaatatggctttctggagtgcccctgctcataaattgcccctctacacatcactagtagcccctgtagacagttggtaggagtttcatagtcttctccaggttgcagagcaggcctcagcctgcctgcctccctgggctctagggaggggtggagaacacgggtcctgcgtgcactcactctgcccacttgccccctcagcctctttcccaccatgccacggcacaacttgcacaagatcgctccacttgtgaagtctctctgcgccaagcacggcattgagtaccaggagaagccactgctgagggccctgctggacattgtgaggtgagggttgggcttaacaggtgctggggctctgaggcaccggtaggggccagagattcagtggggctgaggtgagaggcacatggctggccttacagtagagactactgacctctggtctacccagggctggaagaggatctcccctctctccttccccaggggtttccctagggagcattaatcagtagcccacagcccctgtggtaagtggcaagccctggtcagtagctgaaatgagctgcatgacttctacatgtcccaggctagaagccttggttcctttccatcctggttcctgagccctggtcctctctctctttgcagttccctgaagaagtctggggagctgtggttggatgcctacctccataaatgacagcagtcctcagggcaccctcggggaaggggcacagttggggtaacggccagagggaggggagggcttttgttctgaagggttctcatgagactgaagtgtccgctggctcacagtccccatgcttggtcttccatcctttcttgttcttctccccaccccaccccccacccaatcctcatggggttcccctttgtcagccctaaccctgtcccctctgcctctgcctcccaggcccttctcccaaagatcaggagagaggtggctgaagcagatgactgcatctctgcctttaacttctgcatctaaagatccctgatatggtataaaactccgctcctcgaagcctaggcaccagaccttagtccgcactcccttctgtcccacagacacactgggggtctgtggagcagggtctaggacttggctctacactccctgcctgcctgtggtctggttgtttggatgaagacatgctgtgtgttctgggtgtccttcccatggctgggattggtacatagggcctccctccagctgcccagggccaacttagaccttgagacccaaggaaaagtcctcccacacccaccattcatagctccaggccttagggttacgaaggttctgtttcactatctacccaactccggagaccaaagggaatgtcccccgtgtgggctcagcagaagcagtggccaggttgaagataggactggccagcctagagccataacctatctctcactccagccagatgcttcttagttcaaaacccaagattctagggtggtcagacctttttcaaatcctctggcccatccctgatgcttggtctagcgaatgtggaccttgcaggagagtgcctgagctgctctccccaggatagggttgccagtctggctagcacttggcctctcactagttctttcctcgttttacaattttgtttgtttgttttaggtgttgttgtattaacatttcctacagaatgcttctgataggagggtaacatagggctgggctttaggacaatctacctttaccagaggccccttgccaggctcccctaaggccctttgggtagagctaggctttgccatcaaggccactgtataatctgtggcttgagactgctgctatcagggcaggagaaacaggatggggtgggttgtctcaggaggctgttggcggtgaccagtgaggatgagcaagaatatagagggaaggggaggtcagggaggctgagggcatgagggaagtgtgagggcggttgggaggggggggatgtcagctgtatcaggaagggacccatgctgtgtcatcctgagagctaatggactaaccaatatttaaattggaggaagaggctcagcctgcactggggaagccctccaggacccccagccaagacagaccaactgcttgttgttctacagaggcagagaacccagaaggagctgatcataatttctatcacattgtttccccacctctacttttttgggaaataaaaaaataattttattctcacttgcctggagctcagtaagatcaatggatggctaatgttcttgtatgctaatgtcacgggcatagtaatgcaaggtctgggtggcagggacacacttgccccacaggagaaaggcctgactatgaaggcaagtagcaaacagagcccctgacctctggagatggaggcttttattttgtgctgctgtgcccatgtggaggcttggtgagtctctgcaccctggggaaggcctgtatcaccccagccctggttactctggccttaggtctgtctgaccagtctgggaacccagaataatctacacagaaggcacttcccctcttcaccctgtggttggacccacgctgctgctctctgagcatccatctctgacaggcacagagagccatgtcactccagctgtaccagggaagcgtcatcaggcacttggtggccaacactccagaagttctttgctggccttgtagctgctcccagcaagttcagagagaactccagaagagatctcatccccatggatggccaagacctagccagatacgtacaggatagtagccactgcgtgggagtgattcccagtgactgcactgtgcctagaacagggcctggggtggcagacattatcactgatccactgagtggccctggatgagtcctctgccacctcatctccaggaccctcggtgccacagtttccacattgaagaaaagaaaggcttgggctaaaatgactccaaggctgctgacttttgtccatcactacaagtcctggcctcacctgagtgataagcccactggagaccttggaggtggcagactctgttgcgcacattttcagtactcatctatgtcttttttccacttgctacttgggctggacacacacaccccaatacccagtatgactcaggccaaaccctggctgccaactgcaaatgtggagtctatggcatctgacacccagagatctggggagtaggagggtgattgaagggaacactcttgagctgtgaaggtaccagggaaatctaggcccacacccttgagcttctgtcttctctatgataaccacctcaccttacacacacactcctagatcccaccttgcccttgagcactacctgaggtccagagctgaggacacccatgcctgcccctctcttgtttaagtgcttgactgagacccttgaccaacatccccaaatttgtggggttctgtcccctatgaaagttatgaccctaatactcaaagcccagagtaatcaaaccctgacacctcccagaccaagatgctaagaccagagaggggaaggtactcaccctgagtcagcgcagtgacagcagatacctcagagcacacatgggcaattcatgctttaccccatctcttcccctttcccccattatgccaaatgtcacactgtacaggaggccccatgggtagaggcagacagtggggtggttagtgcaggtggaggagatgataaggagtagggtgttactgaaaaataaatccctaccagctttggggtaatgtgagcatgtgctaggcaccagccccagaggtggggctgctggagcagcctggatatctgtgcatgcatgcatatctgtgtgtatagctggaggcccagagatgatcagcagcttgatgcgttcctcgtatatctagctgaatacatgggagccttcagggccactgggaggggaggcctcttcaagaaggtttagaacagaggttgcagccacttagattagtttgggcggccatgccttgacccccccccccaggctcgtctggctttgctatgctgacttggaaaggacttgaggacagctgttgtgagatggaccagacagcagtcagctggtggcctgtgaatgcactggaggaggtttgttataggttctggataccagtgtttctttgactgacaggatttttacacttctagccaaactggcttcaccataaatggaaggcacagccacccagtgttttaggacatcacaatcatggccctactgccttctgctgtcatcaatgcttttctttggactttgaaggcatttgggtctttctttaaaccatttggttcaagagaaccagtaacaggaagcagggcttggaaagtgttgaggtctttatggacacagtgtgtttgccctgtgtcctttctcagggcctttatctccccactgctagccacacccacaaaggcagaggctgcttcatgtgagctggccactggagactctcagctgttggtggactgaaagaacaaacaagccgtggcttcccccaggaagctttatttctggacccaggactgttgtatagacagtaaaagggggggggtgaggacaaccaaggccttttcctgccccattgataagtatggtctatgttctctgcatctttgctctgagaaagcatgcaggccgggaggtgggactgagctgagtggaggtgacccactgccaagagctatagcatagatgacagaggggaagaaaggacaaagatgacctgtcagtaatgggctccaggcagaaggaagagacctaaaggcaggggtctctgtggggtattagataactctggatttggagggagagcgcactccccggagctaccactaggggcgacatggaacacaagtccacactgcagttgtgtggatacccctgggtggtgctgcaggcccagtgattcctctgaacgggatgagtctctgagcatgtcagcgtacagataagaactctgaccatctgccagtgtggggacaaggtgctgccaggcagtatgtgaaggaaatgccctccagagcccctcctggattggccatacctatctggcaccaagggctctcacaatttgaatggagaaaggatttcttggagtgggaactgttagtatagaaagacagggtgacaaactctgggtataagaaatctgcttttgaagcaggaagcagtttcttctttagtgttagggcttaaactcagggcctacacatgctagactaacaatcttacccctgagttatagccccagacccttaaaatatttaatatcaccatcttgagacagcgtttcatgaagctgccttggctgcctttgaacttgtgaccctcctgcctcagcccaagtagcttggattacaggaatgtgtacagggttagaagcatccttcgaggaatattgcctgaggaggaaagtgaaatccagagaaagcaaatggcttgtctcagagcacaaagtagttagcccaagggcatacagtttataaatacacctgtgagcccagccttttgctaagggccttcctggaacatcatttttgtttctcaccactttgaaagtgataattcagctttgagagcttgaatgccttccctgcgatcaagcagccttaagtcctagcaaaggcaggatttagccctccacccacccctccacctaaccccagaaaaagggaggtggaagctaaatggaatacgatcaaggtggggacccagtagatgccgatgccaccaacctctgctccctagctctctccaggaggctccagctggcacttccctgggcagtgaggccacagggagctttactctgtgggcctggaaggtaatgtaaatggggaaggccatcacgtgctctcttggcccagggtgagagaagaaggacgctacacatccagtctgtctggcatcctctctgacagcaggctgaggtgtcaggccgggctctgacaatcactgacagtgaactgagctgggcaggggaggaactctgggttaggaggacatcccagaagggaagaggccaggaaaccaggcactactcatggtctctgtgaacatgaggggctttgggtcttgaacagtcaggttccacagagcaggaccagggaaatgtgtgacctacagtgatgtgacctacagtgatgtgacctacagtgatgtgaactacagtgtttgcatccttccctttcaaagacagcacagtccagagcagtgggagtgctggacaagagtgggtgtgtggcagtccccacaactggtggggcagcctcggctccttcgagaagccccagcttggtatttctgccctgtttgctactgcctgaagctgttgaaacttgtttatcaaagaagatctgcagcccagcggagtgtctgtgctgggtgcggaagggcccactgtgccctctgttctcaccaagcttgggtttaggtcagtagttgagtacttgcctaatatgcctaaaggactgagtttggctttttagcaccaggggaggtatgccctaccaaactggggcgcttagtgtaaatagaaggagacatccttagcactttgggggtggagaaccaagattaagaaaactctccccatggagctgctcaacagttgataggtacagtcagctgcacccattatccagacagagatcctaaggccaagtgcgaggctagcccctgctcaagaaacactcctcagagtccaagtacttagggacagaatggccatatccgagtccctgcctattcagcactgcaactgttgtttgcaaagtctcccggctactggatcctcctccatggaggcctctaggagcccagtaccaacacatgggctcccccatcccacaattcagaggctcctgcagatgtgaccctcaactctggtcccctaagcacataactcaccccagggtgctgctgagagtaggaacaggaagggaccaagccctgaggtggagccgagctggagcagctgttgcctccatgacccagagcacccagggtggagggagcaccttacattctggacactctgctgccccctctgggaagtctgaagcggatctggctccgaaatccatgaaaattcaacacttggctccatgtgtctgggttgctttttatataaaaataacaagttttcctccaattcttgttctaggaaaacatgctatgctcaccatgtagctttaagtgtgtttcttccaccctggtcctgttgggcaggtgccacggccatagggctcttgaacagaaaatgctgaggactgaggaaagcccacaggaccaggcaggcagacaggctgccctggcagggggtgaggagggctgtcgctcttgtccagtgtcttggtcttggtgactgctggagtctgtacctttacccccttcaccacccatgagggtgctgtcttcattgatggaggtatgcatccagccagatgtcaccagacttcttcagggacctgagagttggggataggggtcgaggactcagctggaaggtattagcattccccaccccgtgtcccataaggactattgagtaaagacacccctgtgagttcccatcccccaagacaggcagctgcgtggggccaggtactcattaaccagagtggaatctggactgcaacagggaggtaagtggcagatggccaaatcaagttgtgagcctcagtgggtctggtcaccattcatcttgttctccctgttgcctctcccttttggactctgcagcctaaagacatgggacgcagaacctgccccatcatgaccccaaagacaaaaactggaaaagaacaatgtacagctgtctgtaggtctggactccaacctccatgtccctacctcaaggctgctcctgggggctgaaccactccctaccccctcacccctgcctgatcagacacaagcagcttggccttcccctttctgcttccactcttgctcagagtacatgcctgcttagagcatctttgcaagctttgagagtcaggtggtctctcctcctcttagtggctcgttcctgccttggggcctctgcagggcctctatctggaatactctttaaccacgtgccctttccccactgaccagctgtctccctacttcttgcctctgctcacacagcagcttctccacactttgcacctgctatgcaataaacaatattataccctctgcctgacccttcacatcccctctccccctccaccccagggtttcattctcgttatgttattaaaatggttctcaagttttgtcatgtacttgttgtttaagcgcgcgcgcgcgcgcgcgcacacacacacacacacacacacacacacacacacacacacacacacacacactgtgagtgtttgtttgtggtgtgaatgcatctcccatctccccccttccttccttcctccctcccccactcccgcctccctttcatctctcatagccctcctgtccccagaggccagcctccccccttctctccccgctttcccatcccctccccccgcaataaaaactctccactcaagctctatcccatgatggtgtgactcctccttcccaccaattttaaacactggtcgatgcccagagtcttcttattgattttctatcttattttctgagacagtctctcactgaacgtggagcttactagccaataaaccctacagggatcccctgtttctgcctccccagggcatatgccatcattcctagctttttacatgggtgccggggatctgacctcaagtctccatccttacccagaaagcactttacccacggagccatctccctagccctacaaatgcttgctttgtttccccaactagaacattggcttcagctcccaggaggcaggaacctctcagcctgtctgactcaccgccatatttatagggctccgtgagtcctccatgctgggagaaaaggagagcactggctgatcaggaaaggtccagaaagccagttcttaggaagggccccctctgagagccaggtacttggaagatgctgacctgctcaggagtgagcatggagccttggaagaaactaatatgcacaacctgaggggcccagtgcagccttacccaatgatatccaccagggcggtgaggaagggtttcacctcatagtgtaggccatgcttggtgcagaacgccttgaccaggggggccaccctgcggtagttgtgccttggcattgtgggaaagaggctggaagggcaggcaagatctgagtagggagttgccagagggtacccacctactcctcatcctccagaccacatcttctagggatcccacagaggtaagttctgggccctagttttgacctcaccctgtacccagcaagccctacaggccacacttactggtgctcaatctggaaattgaggtgcccactgaaccagtcaatgaacagcgaaggttccacattgcaggtggctgccagctgccaggagcaggaggggtacaagtgagggagattggctctgaaccttaaccccaccacctggcagcctcagcaaggcctgatccttcccaggccccaccaggctccccagtgcctacctgagagctggcccagtctcggtgcttttcatggccaatctccttggggatgtggttcatctgtgtgatccacacaaaccagtggctctccaggaccctgtgagggaggctttggtactgccctagatcccgctcagagtggaggctagcatgcatacatacagcgtccccgtctgtacaatggaattatctagttgcttccaccttgacatttaaagaaacttcatagagcagtgtccctggtgagtctgagggccacccccagagccatgaccaagccaagctgctttcctcagagccgctagccccagggtctggctactctgctggtgtttgagtatcctaacactgaagaggtggcaccagcacccatcctgcacagggacaacaggctaagcagggaggggtgaggtcagggtccccggccacctgtgtgagatctccccattcctgtcactttgaatctggccatacctgacagcaacaaagagaagcagtgtcccagttgcaccatagaagggagcgtaggacaagaagaaacgggagtagaaactggcagcccacagcaagtcctacagggaggacagaggcaatgttgagtgtggcctcctccgggttaggggagccgggaggcaggaggaagggctggggtcattcaaccctctttcatttgcttcagggctccggacaggccactgcccctcatcgggcttctgctttcatggctgagtaaaaggatgggctccctgccttgtcaccagttagggctggccatgatggtgacttgaagggtgcgttaggaaagcctatgcctgggatacagacgcctggcagtcagtccagagattctccgcatgaggggagctccttcacagaagagagcctcagcatacccagaggtgcatactcctctcttcttgcgcgcacacacacacacacacactcacacacacacacacacacacactcacacacacacacacacactcacacacacacacactcacacacactcacacacacactcacacactcacacacacactcacacacactcacacacacacacacactcacacacacacactcacacacacacactcacacacacactcacacacacacacacacacactcacacacacactcacacacactcacacacacacacacactcacacacacacactcacacacacacacaccacacacacactcacacacacacactcacacacacacacacactcacacacacacacacacacactcacacacacactcacacacacacacacacacactcacacacactcacacacacactcacacacacacactcacactcacacacacactcacacacacactcacacacacacacacacactcacacacacacactcacacacacactcacacacacacacactcacacacacactcacacacacacacacacacacacactcacacacacacactcacacacacacactcacacacacactcacacacgcgcacacacacgcacacacactcacacacccacccccacccccaggggtggacagtgcccccctgaagccctcttgcttgcggtcttgagcactcaccgtccactgcaggcacaccagcatgtatgccagattttccacttcaaagttcaccaaggtgagcagtggcgggccaactgcaagaagggagcataggggcatgcagtaacaggggcggggtacccgggagggagaggtgggcagagaagtgaagaggccgttcctccaggaacacccacagcatataaatgtggacctatccattgagatgacctcacagttcccacagggcctgactcatactcagtctctcggtagctggctcttggccctgtttcccacctcccttgtcccttgtataggtcaggagccagccttacatatttctgcccttgagtctaccctgtccctgtttgcagaggcaattacaaaacacgctaggactctagacaacccttgctcgagggcagagagactctggggagtgtgggaaagagtggggacagcccgagcagaaggtggcttggagcccttgggaggacagcatatccccaccccaaagggccagcaggtactcactgaggaagaagtacagatgttgatggttgtaaggcagatatctgcgtttcttcttgccatactgtggagacaggcgtcggctggggagaacagctctccaggccaagatcagggggctggctgaggccaaggtcaaaggcaactctagattctagccactgggccactcatccccaggtggctaggagatgggggaggactggacctagagctagaatgcaggctaagctgggggcaagcatggggtctcagtccctgccaagtcccctgagctgcaggcctgtcctgagtgtccatgtcctatccacttacctccacagatgactcccccaggaggaagacaggtgccacagtcacatccgggtccttgtggaagatgttgggcttggcatggtgctggaagtggcggaaattccaccaatgggcagagaagccctggggggagaagggatctcaggtgtggagtcaggctgtgcccctacttggcacccgcacacctgagcaaacccagtacagagcccccattccatgcctgggtgcccacccggatccacactcactttcaactgccccatcacgaactgctgggccacatggttccacctggacttagtgaagatggaggcatggcctagatcatgttgcagacaccagcactgggcctgggggggtaggtcaagagtagaggagaaatccaggagcgatggaggaggctacctggcactaggggtccacacccactgctgatgctccacctactactgctgttgcaccgaaagcagctgcctcttttactgggccaatgcacccgagtttgatagtgtgtgtgcatgcgaatgccaggcttcagaaaagtcatacctctgaacataggcttcagaagcaaactttctgttcttctcatagcttcctgtcgcctgcttccctgcatcccccaagacaaatgatagaacctagaattctctaccctccctgaggcaggccatagacacaagggctcttcccaaaagcctgaactcactactctaatttcccttttgccttgctgctggccttgaagaagggccacctcatctggtaagagctcctaagaccctgtttagggaagcgttccatcccatacctgggagggaagatgccttcgaaagaggccaagaagaatctgaggcaacaggctttgccaggtttccactggctcagaccctcttattctatttccatcacacagatcttttgtgtctaatcccattcctacaggctgtccctgctgcacagaccctacacataaaaacacaagtggaaagttcaccctggtcttttgctctttaattgagggctccttggtcacataacgctatgatcggatacattttctaggtttttcttttgctaatctgtcttttgttactggggtgttagcaatgactttcatgttaggcagagagtgatcacccttttcgtcacctgcacaaatcttgtcatgcatagggctgtgacattctggatcgggcacatcttaagggcctctagcatttcacttattcattcatctacccatccacccattctttctttcattcataaaaaaaaaaaactgttctgcatttccaaataggcgggactcccatatctgctgtgtagtcttggggttacctgagagatggccagaatgagagcagcaaggatgctggacacccagcctgggccgaagaggtagatgataagccaggccagcaactccatagccaggatgtggcccagcaggagtgcaaagaaagtacggtcagcttcaaatagcttcatgtcttcagctgcctggcgcaaggctcggaaatcctcaatcagctgggtctgtggcaggagagtggtccagcagatgaggaatctgggaccatcagagttcccagaaacttccctctgcttctcaaaccatcctgtttcccattgttgggtccaggtgttagcaaaggtgatggacagaagaacaagaacaccagccagggtgtgatctggggaactagctagtggctaagtctctccctgaccccaaagatgtggggtaggtgataagcagagaaaatcaaagccagtagagggacccttccagactcaaaacaccctcactgtagaatgtggtgggcactggatctagggcagaaagaggcctcatctggagacccacagcaagttcctagctaagtcagatctggaatccttacttgtacaggacatggctatggcttccacgtttaatgtggccccaaaggggacccagacccagcccccaccctgcatcccacaggagtgatgcagaatagctgctactggcaacaggcaatgcccctaaggcccccagatgttccctcacattctgagccccatcctggctgggctcctctggggctagctctccaatcagcaggggcttcaggaactttcgcacataatggagatcctggtggaaggcgtggaaagcatcctgaaggagaacagacagtcaagtgaatagacagctcatgtagcacccaggaagaaccacagaaacagggtgcaaaggctgttgcggggctggagagatggcacagtggctaagagcacttgctgctcttgcagaggttagattcccaacatccatgtgctggttcacaaccatccgtaaatccaggttcaggggatccaatgtcctcttcgtatctatctctgtgacaccaagcatgcatgtgttacatgtaaatacatgcaggatgaatactctcacatagaaaaacagaataaatctaatttttaaaactaacagaaagaaaagactgttggtgatcagacagacagacagacagacagacagacagacagacagacagtcagctatatgtcaggcagtcacacagtcatagacaaaaagaccaggagggtcagcctcacctatcagctctccctactcctccccaggccccaggtgccctgttcaacacccctcgcttgccacgtcccatctgctccatccagcacagggccctcttctcaatgtgcctgaaagaaccccagaaagactgaatccattccaaaaagttttctgtgtgccacagtgctttctactgcatgtaaaacaaggtgtggctcacaaatgttaaatttatccacttcttaccaacacaacagtgagtaaaatgtgtgtgggctactcctgggccacttgggatgggtcaatggtgggtcatacacattgagttcttgggttcatgcaaagaaaatatttgagcacttaaacgtgtctgattattcttttctttttggagacatggtctcatgtagccctggctggcctcaaagttgctaaatagcccaagagagaatgaccttggactgatcctcttgcctcaacctccctagtgctgaaactacaggcatgcaccaccatgcctaaccagtttatgtgagtgctgagaattgaactcaggggctccacacatgataggcgctaagcactctaccagctgaggtacattctcggtagatagtataattttctaagtacagaaaaccctgatgctcctgtgtctttctataataactggggcaggggtgaggagctttacaggaaaaggatgaaagagggagataagatgggtgataaggagaaaggtggccagggctccctccctgtcacaaccctgttcttgctgtttacttggacatcattgtttgcttatgatatcacatctagcccatttattagtcgcaggtggtcgactgatttttactgttgcaatttcaaaagcagagtgggtgactggatgacattgtccccatggccctgggaaagaagactgagggcccttccaagatgctaaaaggaaacacctttgcagaagtctgacaaagaacagggacctcctattattcaagacttgtgtaggttgaaacagaaatgacattgttaactatagtcagtcaccctactgtgtcaccaagctaataaccctgatcattgtacattgtgcacaggtgttgaaatagcccactggccccaggaacaggggccttattaagtgtctatcaaaaataaaaggctgggaagatggctcagtgggaggagcacttgccataaagcacaatgacctgagttcaaatccctagcacccacgtagaaatctgggcatagctatgtgattctgtaaccctagcactggggtagggagtgggggagggcatagacaggaggattgctggagtctgctggccgccagcgtggctccaggttcagtgagagagtcttgggggaatggagtaaagagtgatagagcatcctcctctggcctccacatgcatgcaagcactcataccttcacccacacacatacaacacacacacacacacacacacacacacacacacacacacacaccatacagataaaataagtaataaaaataaattaattttaaaagaaaatgaggctgaaaatgactgtagtccctttactctctggcaggacatttctgatgagtacttggaggaaggagactatttagagacgatacctagagtcttccctaggggtcactgacccaagacagctagggactggagagctaggagggtgtggcttctaaaataacccaggctggatggttccctgggcctcatccagcagcagaggttataaaagcatagccctcatttcctctggagatggaggaggggcagggacacaggagaatagggtcccacaggaagctgcctgggcccaggctcactggggttctgttgactccctttccatgtgactttgagcctctacttcctaccttcaggacccttctgacattggactttattgttgtctttatttcgaaggcagggtcacacatagcccaagatggccttgaacttaatatgtaggtgaggatggccttctgctgctgattcttctaattccatctctgagtgctgggattgcaggtgtacaccaccacttctggtttgtgtattattgaggattgaacccaaggattctgtgggtgctaggcaacatgctaccaactaagctacatcctcagcctaatattattatatttatcatcatcatcatatcatcatcatcatcatcatcatcatcatcatcatctgtaaaacacacctaagtttaccactcttaggaccaaagtccagtggcatcaaggaccttcatgctgatgtgtgaccatccatctcaagactatctccttcctcttccccagatgacggctatacccattcaactcctcactctccttccactgccccgaccccaccactctactctttgttcgtatggctctagccttattccaggaacctcacaaatagagtcctatagcatttgtccctttgtgattagcctatttcacatatcacaataccctcaaaattcatccatgctgaatcaagtgccagaattccctaaaactgatggagatttgaaacctctctacctgagcacagagcctgggacatggaaagacagacagacagatagacagacagacagacagacactctctttcttccctccctctgtccctccccccttacacacacacacacacacacacacacacacacacacacacacacacagccacccaccacctcaacaagcaagattcagactctcagaaatgtgcctagggtcacagccaacatgaacaccagacacagccctgtgcaggtgtgtactgtagggaggtgagcagaaccaggcccacccaatggtcttccaatcagcccagtccactaaagtgatagggaaggtgtcagtccccttgggaccaggtcagaaatttccacggtgggtaggtcagggctccaggtggtggaaaggagacatgcaggtagccttaggcccttgaacagaaggctgaggccttggaactgagtgagcaccatggagcctgtgtgttattagagaacactcacaaggtgggtccctggactgaagcaccagcaagggacttcctggaactctggcttgggtcatatggactagttctttctgggatcaaggaccaagggccagggagaaaggaagattcagaaaggttaaggggtatatcaccaaactttgtaatttccctcaacacacacacacacacacacacacacacacacacacacacacacacacaccactttagaagagccaaaagtgaatgaaattgcatctctttcattgagtctcagagatgagtgggtagaaactgctggaatcaaaaggcataccacggaggttagagagattgctcagtagttaggagcactgactggctttgcagaggacccaggttcagtttccagcacctacatggtggcttgctcacaagcaccataaatcccagttccagggaatctgacacattttgacctctgtgagcaccaggcacacatgtgatgcacatatgtacatgcaggcaaaacactcatatacatatattttaatctgaaaataattaaaacaaagccgggcgttggtggcacacgcctttaattccagcacttgggaggcagaggcaggcggatctctgttagtttgaggccagcctggtctccagagcgagtgccaggataggctacatagctacacacagaaaccctgtctcaaaaaaaaaaaaaaaaaaaaaaagcaaacctacgttcctggtgactcttgcaggatctgtttacagatatacctggtttggggcaagttttcaagtgcagatgataagtagacaagagccagctctccccacctctcagggcagggttgtgaactgtttttccctcaagacacctgtcccagtggaaaaatctgtagtggcagagctggtgtttgaacttgagtctgttctccctaatgtccacataccctcagaatatggaaacctcagagtcaagaccagcagagcccctgctctgaccccagccgcactatgagctcctcgtagccgctgcctaggggctggagaggtggggtacagtctgaagctagccctccatcagagatggaacctgtgattccatgtaggaaccccagacaggcttgccccctctaccctctgtatattcttctcaataagatgggaaacattaatgcacacctcacagactgctggaaggacggacttggtgggtaaagcacttagaaggggcctagcggctaacagcagccccattgcccagctttcttcttcaatgcacctgctgctgacagccacaggctgcaggtgtgagtgggggagtgaaaatgtgatgtgttaggtctcaggctaaggaacagggagggtgggggcttggggaaacaacctccttctaccccaggcacgagagggagggaagaatttctggtctctggccaaagaatggagaatgttccagatcagccagggaggtgggggagcagggagctgcagctctggtgatttgggtctgcatttgctgcatttgctgcttgtttacacctttgctagaggtgggcatggggtctccagggacacccctgcctctcttaccctccaaatgaaggcaggcaggagagactaaggctgtgcacttaagtgtcaccctcttcccagcactgccttcaagaggccaggtgggaaaacattatcagtaacccccttaacagatggagaaaccgaggcaaggacagggaagcaaggacacggctctgaaacctgcctatggctttagcctgaagcccagctcaagggaagctgccccaggcccctcagcatccctggtgtcttggtgaagggtgagaatacacgtttgatcctctgctagccaggacccttggcctcagagatgttgccgtctcagcaaataccagaaaataacccagccttctggcatgtggtcctctctttatcactgaactctggttttactactggagcctggctctttttttatcaggaacccgaaggcagccaagggaagccttccctctgaggaaggaaaggggaagactgcctgacactctgaggtcaccactattcccaactccacctctgcacactgcattcctgccagtcacacaatcctgactcctccccacagggagggcatgagcactgggcctgtgagtaaagcccacctgagtcaggtgcgggggcttgcgcctgtaatctcggtactcaggagggaggtggcaattgaggtctgcgtttgaggccagcttggtgtatataatgagttctgggccagctggggatacataataagatcctatcataaaacaaaacaaacagatgcccactctcaggctccacaaaatgactactcgctgaagtaggactttcaaagcagccagtgtggttgttgggaacaaggtgtgggcattggttttgccctcactaggcctcagggcttcctggtcataatcctgatccctctcagctcccatcatcccaaacccagggatgaaggctttgtcattttagggtaccataacattgctcaccttctgctccaatctttttatctacataacagataggacccaacctcccaaggttgctaggagtaaatacattatcatatctaaaattctcagaacagagcctagtcaataactgtgtctgaaactactatgacacggcctctgatggtggcactagccactcctacttttagctcgtcatttgcaaggggccacaagagggtagatgccaggtggctcaagcctgctgaactttgaattcttctagggctgacagtgcttcagtgcaacgggcaccagggaccgctgggaaaccctccaccttccccataaccacaccagttgagttcagggtttcattgcccatggtaaccagtcatccaggtgcccagcaccattcccacagtgagcccaaaaggaaagcactctaatccctgccacactgaaggggaaatagagtcacggcctgaggacaggtcagctccttctctaattataacacagagatagataactggggcaatttgcaggctgggtggtggtggttctgttttgatacaggatctaatgtagtccaggataacttcaaactcaaagtataagtgaggatggatgatactcaactcttcatggtcctgcttccacctcccaaatgctggtatcacaggactgcgccacaatgctggactcttatttattttgcctcattaaaaaaacaaaaaaaaacaactttcactgctgggtattaaacccaggtccttgagtttgctcagccagcattctaccactgagccatatcctcatctgacagagctaattctaatggcccctaatagtatccacatatctctgacgagacacattcacacactggagcccaattacatggtcatttgttctgaatgcccttcccaaagagagagcaggtccccatcttgctttccttgacattttaaagccttttcccttttagaagattatttttaattatgtgtatgtgtgtgtgtatttggggacgggatgcgtatacataaatgagagtgtacagaagctggagctgttggctctcctgcagctggagttacaagaggttgtgagccacccagtgtgggtgctggggctggaactcaggtcctttgcaagagcagcacttttcaccactgagcatctctctagccccaagtatcctttatttggagacaaggtctcgagtatcccagactgactcaaacttgcctcatacctgggggtgaccttgaacttcaagtcctctgtctctgcctcataagtgctggggttacaggtggatgccaccacagtcaagtttatgcagtggtaggcatggaacctatagcattaggaatactaggcaatcagcctaccaactaagcttcatcctacccttctgagatctttttaaacatacagcagaccccattggtttccattctctgctctccctgaatctcctccttctttagaataaaccaatgtccttctaaggacaaaaacatccagtgagcctggcatgcctgccttttgacttcctatcctatgactgctgtctattgtggccatgctgtattccttaggtatgggtggtatcatcccacctctgagtctttgctatagctgatccttccctgcaaatgttttgttcacagctgcatctgcagagactgacggagggggcataggagatactcatgggtggatttaggggatcccattatggagaaatcaaggtggggaaaagcgtggctgtgcattcaaatcccacacctgccactgtttcaagtcactttgtttctctgtacctgatttctcatctgtaaagtgggataatagcagcaatacctgccttagtgggggtatcctgggaattaagaaataatatcaagggactggagagatggctcagcagttgagagcactgactgctcttccaaaggaccctggttcagttcccagcacccacatggcagcccacagctgtctgttgctccagttcctgggaacccaacaccaatggcaaaacaccaatgcacataaaacataaataaacaaacaaataaataaaatagtatcaataacagcattgaatttagagtctagcacatagtagtaggtgcttggtatgtgaccctcacatatttatgaccagcagaggctgtacctctctggctgcctcttctcgtctatgactcttagacgaacctggccctgggcccagagtgctctccccagggcaccaggctctgtatcccaggatggtcacaagctgacttcatggcacaagaactctgggaatttcctggcaggaaggcttctgttgcctggacatgagaacagctgatgggtgtctgggcagatgcaagtgggcagcggcctcccacccccaacctgagctccagggtctgggatgggacaactggcatctagacttgatcacacagagcactggaccagttcaacacctggtatgccctgtgggtccatcatagacaaagactagggtctgctgaacctaggcccctcccagccctttgatttgagcacaccaggtatttttggcaactcttccccagtgtctatggcttatagcaatctattcttacagacagggtcagagacagacaaggttacctagtaaaggcttgggaatgctgtgagaatcccactgctctctccagcttgcatacatatactaaagagcagttattgaacatacaagtgtgacacagcagcatcgttgagaaggtgtagtcttgcccttggctggcttactatacggcccagctctccccacttgaccaatgaggaaactgaggttcagaggaattacagctcagagccttcaacggcagagccagaaccctgccacaagacacagaaagatgttttcctgacagaccttactggctgtaaatcaaaatggtggctacagcaaaatcattagatggaggtctcagggcactgagctaaatataaagttaggaatcccatatgtaggacccccaccccccaggtctggccctgagcaggaaaaagcaatcagtccgtgctctctgctgtcctctcctgctcagcatcctgtcctatgctatataacatgatcctcatggagttgccagggctcagtgggagaggccgtggcacctcatgcccaccatgccctcataggaaggtaggtccacgcgcacacgcaccacacacacacacacacacacacacacacacacacacacacacacaccacactgtggcccaaggttggtgattttcaggaaccttctcattcttatgcctctcagttgcttggagtgaatgggaaagaagagggacagtgacagtcctgggacagagcagaatcttctctgctgccaccaagttcttccattaggactccatgccctccagtcttgaaggtctccctggtacccattgtgactaacctacagttctggagagtagggggcagagcctcatggcctcgacctttgtccacatagggtgactgaggctggaagggtctgggaaattgttttaccactgggctccagccagatagtgctccaggccagccacatccctccttgtctagacgtggactgagaatgggaagccagagtccccaggggccagcctgtgcctggggtgactgtgcttcccgtggaggcccacccagcctggcaaagtcttcccacgtgcagctgccagcccagcagaggtgagtcactggccctcagaacagtctacacaaatgctggataagccacagacctccaggccctgcccaagctctgctgcccagcccccagtctctgatggcatatccctgtcgttagggacccagccctgcccctcacactttggaagcaccaggtactagtctgagagactcacagcagaaatgagaccctcggtacaacagtaagggtgcttacctagggtggaatctgcccctcacggcacacccacttcagtgggcccattcctcccggagagacctattgcacagactgaccaacagccggtcctccatgaaagaaagagacttccttggccctggctgcatctcaactctggagccagggcgtggggtcaaaggtcagaaagagcagaaaggatgctaaggtccgcaggtggaatgaggctaggagcctacgacccacgtctccctccccaccgttagcgcaaggctccaccccgcaggctgtgggttagcttaccgtggcgtcctccgcgccgtggtggccgatgaggcggctgccccctgggtgccgctgtgcccagcggctgatgtcgtagacacggcgctcgatgaccagccacttgtcgcctggtaggtcgtgctggcggatctgctcccagcggaagatgggcaggggcgcccccagcggtgcgggcccctcccgcggccccggtcccccgccgggctccccgacgccacccatagccgctgtgcacaagtcccccggaccccggaatgtgaccgaggtctgacagagacaccgtggaaggcgaggtcgctatctggggtcttcctccgccgctgcccgccctgccggccccgccctgccgctgcggccgccgtatgagcgtgcgcctgcccggctctcggcgcagggaacttttccctcccttataaccgcgctgacagcgctcgcctcgcccgcccctcgtcccggcccccacgctggccagtcccgagcccgctccaatcccggcgcggctcctccacctccattggctgccgggggagggcggtgtcgcgaaggggctcgccccacccgcgaaggcctagggggccaccacgcccggcccagcccccgggacactgtcccgcccccagttcctcggactcgcagcttggccgagtgtgggggtgggaggaatggggacccggtcgcgtacgagagaatggcaggccactatgcccctcaggggcccaagaggagcccgggtctgagccctaaggggctgggaagtgtggttagggatgtcacgggggccttagccatacattccgggtggctatagttgaggacactatctctggggtgactgtcaacagcctccaaacaatggacctcaccccacaacaaatcctcaacatccacacgagaaggccatttagagccatctgctggggtgatagcctcttctctcctttggctgcatacagggttgggggtgcccagggtggtcagaggaggaagggaacagaccgcaatggtgcctgcagcgctgtaccaggaaagaatggaccagcctgcaatgggtggcttgcttgttaccacctcccaccccaccccaccccctttcagtggtatttttgacttattaaattgaaatcctcttgagagtgtagctacattcccaaattgtacgatgttactttgaggtcgacaccaattccttaaaagttaagcattcacaccaacaggaaccacaattggcaaacttgaagttctatcagaacttcccagagggctagttaaaacagaatccctcactccaccctatcgtgacgtggctcagggcagaaaggtgaggcaggcctgctggttggagaaaatcttttcagaaccttaaagtatatttctccaatatgctaacatttcctcttggcctacctaagaatttgtaggagacctggcctttaaggatatcaaaatcaacctgtactccttgtcaacataaaatatttgcatgtaaccttcacacatcctgccatgcactttaaatcatctttgaattccttataatgcctaatgtgatgtaaatgctctataaataattgctcactgcattgtttagggaacaatggcaagaataaaaagactgaaagcattcagcccagatgcaaccattacaagcctaaatgcaaggacaggaagagaagcagaggcgagcaatactctaaagaatgttgggaagatagtcaggacccgtgaaaggagaagaggtgacagcagggccagcctacatacacactgcttccttcacatggagagaaaggagtgtggcacattcctgtttcacattttggaaatttctggattttctgaacatgtcaaacttactgctgatgtgtcttaggatgcagaactcacgagatggaaggaccatgcatgatttgtgctgcaggcagaccagagcttgaagaagggagcttcttggttctccctagttcaaggaactcttgctttgcttagccaggacaaccagagatccatgatgttgccacagacaggagctgttcagtcctcttctactgggcccttcagaatcctggaaccccatttctgcacacctggagggtacagacaacagtccaggcccaagaggacagcaggtactgctgcccccacatggtcacactgagcactgggatgaagagagtctgctcttgcatccaaacctggtggcccatagggtgtagtccttactcctatctcagcacctctcagtataatgatgtggctgactcaagagccatccgagggctccttccttgggggtctggcctggatttaggtatgggaggcagttagggattgggtaagtcctagtcataccaggagagtcagcaaagtgaaggctagacagactggttagataaaccaagagaaggcctgaaccatgctaccctctctggccacttcagtccagcatggaatatataagaggaagggggcccccttttcacctgtatctagctctgtgtttctataaagcctaaactatgaatgacctctccctacctcctacacaaacagcttcccactttaattctctgcaggccttggggtcatccctaggccactctgtctctctgatctctgacgctggagaacttgcaacttgcagggagtcaggggctgggggaacttgaggctccattgtccccaaatcctcaaatccgggcagctgaggcctctcagaccacttagaaagggagaggcatcactcgacattcctgagctgccattgggccactgccagggtgtgtgggtgtaggagggggagggaagccagccaagttgggtattttttttttgaggggggtaaacttgagatttgaggagagtccccttgaacaccttgaatgcagaccctcgcctctgtccctctgggtcctttattgttgggagcttctacccaggcctcttattggatgccttgaaattgccaccccctacagagccaccagctactgtcttggagccaagggatgtttgtgcagtgccagggaggctcagcaagcctgataggcaagcagtggctgtaagaaaaaactccagagctcaggcaaaagggactcaagtcagagctctggggcttggcttgagttaccaatcacatcatgagcttggttattagttcggggtacaactcttctgagaatggaggagcgggggccatgggccccacagaattatgtaaaggctgtttggaaccatttaggccaggaaccacaagcctattggccactatggtggaacaaggctccttagaacacctcttggtaagaacgggatgcatagaaatggacagcaaactccgggcgtgatggtgcacgcctttagtcccagcactcgggaggcagaggcaggtggatctcttgtagacaagcccagtctacaagagctagttcctggaaagccttcaaagccacagagaaaccctgtctcgagaaaaagaaagaaagaaagaaaagaaaggaagaaaaagaaagaaagaaagaaagaaagaaagaaagaaagaaagaaagaaagaaagggacagcaaaagtgaaaagaccccaggttactattaagggtgcagatcaaagcccagggagcaaacacctcacatctcttagaatggttactactaaaaccaataaaatatatttggtcaggaggcagaaaagttggaaccctggggcattgttgctagaactttaaaatggtgcagccaccatgaaaaaatacagagagtcctctaaaaaaaaaaaaaaggaactaccatatgagccaacaaactcacttctggttgtttattcaaaaggactctaagcagggcctccaagagatagttgcatacccatcaacaggtaccagcagcccgagtctatctccaatgaatggacagacacagcagggtgtgtctgtccattgctgagccttaagaaggaaatcctgccatcttacaacatggatggatattgagggcattacataaaacaagccagtcacaagaagatgaatatgctataattccatttttggcaagtctctaggggagttggactcacagaggcagaaggtgaaatgctggtctccacattctaggggcaggggaaatagggagttgtctaatgagcatagcatttcttctgcaagttgcaaaagatatataggttggttggtttcatggcactgtgaatacacctaacacagctataattctacactgaaaaatgataagattatatgttttacaacagtaagtgtggtagagattgttcagtgggtaaagcacttgctgtgcaagtccaatgacttgagttaagagccacagaactcgtataaagtttgatccctgtgttcgtaaggggatggtgggaggcagagactggagaattcccagaagctagcctggcctctgcagcaatggatgataaaagactctgcctcgaacaaggggaaggatgaggtccaacacaccaccagagattgtcttctgacatgtgcaccatggtccatgtgcactcacacacacacacacaacacacacacacacacacacacacacacacacacacacacacacacctcacaaacaccaaatgaatgcatgcatacatgaaaattgtagagaaaaatcataatcccaactcagaaatgagaaaagcaacttgctcccaggtcacagccctggcagggttcaaatcagggcaggtttggcagatggtaagtgagatatctcaggttgaggccccaggtaaatgtgcttagtcaggttcaatgctttcatgcctagaggccagactcagtgctagccaaggagggctcaaatgtttcctatgtgccaaccattcatagaagcccaagacggttatcttgaaaatttaagaacaactctgtagctgatggcagttaacctccctaatcggctccaagatccggtaacacagtcaactctaacaggatatatatagtacaggaaacaaacctaggttcaaacgccagtcctatctcaatctgtttcttttcttttgttgtgtgtggtgctgagggtcaaaccccaggccttgagcagtctacttctgatctacacccctagccttctgcaccaattacagaggcaaagaacctaagcacacttggagtgttaggtataaaaaacaaaacaaaacaccaagaggtggggtaatactgtgggtcccagagacttaggacctctgtgtgtgtgtggggggttgtttgtttgtttatttgtttgtttggaacagaggacttacccagagcctgtgctttgcttgcaaggcaagcctctaccctgagctaaacaaaccccaccctcaggacctttgtgttctccagtgcctctatccatttacatgaaggagaacagcatgttttaacgttgctaagaggccgaaataatgggttgagagagggctgggagctatgactagtgctaagctattaattgctgttaccaaggtgtggctgtgttgatggccccacctgtggtctgatctggtcaatgctttgcagcagcaaggcatgtaagtcagcagaggaaggtcctccacaggcctctggagtgcctcctggtgtctctttggtcctgcatatggctgaaccaagaacacagaaattagggactgattaagtccagggctctggttttcatcctcccctgtccccaggtgaaaagggttgacatagaggatgccatggggaatctcatccagtacaccaagtccttccctgacattctcctctgtctttactttcctccacccagtgacctggacgtgttgctagtatgtttattattgccagtgtccagcacagagaccacccctgtattggttaaatgaatgagtagatgtgacaggggtctggtcagcgaccagctgtctatggggactgggaagactgaaaaggattggagccataatggggcagggaggggacgtgagaacacagaggtgcagtggaggaagaagcgtcctgggaacaggctactggccagagagcatgtgaaggcagaggaccttgacagagatctggccagcccccagctgatctaacatctgagttgcacctgggcctcaggccaacagactttccgtgggctacctacctctgacctaacccggaatctgttgcatccttctttcaagaaagcacaaaggcctacaggtgtggcagaggcaggaaccccaggacatctcctcagtcctactttgaggtgtttgagggccctggttatccccaacctctttcagcttgtgcctgccatgccttgctaagaacccatctaagacgggggctaggcagtccagcacttctgtagtccccatctgtcctacagcaggtagcaccaatcaatcttgcactgtcctgccaagccccgagaagatgagatgcttcgactccaggtttctaataggctgggggatcatctctgagggctaggggattcacaggtcagaactgaacacacaaagtggaaaaactcatttcaataccccatagcaccatgaaatactaaggacaactccagcagtcttcccaacagcatgtaagtggtggtagcagtgggggtggtttcagggtttgggtttaatcccaagcacgagggcagtcaggaaaggatttgatttcattccttcagatgcccaagctctggccagagccccagggcgcaagagtgaaggccactgctgcctagcccctaccaacaaagccttcctttattaaatagagatcgtgttacattccacttgaaggaaataggggcgtggtgagggatatgtccaggttggatcccccaagtgcagttcctggtgggctatgatggataaggcagggtccagatcctgggtggcctgcccactccatgcagtcccacatacagggtccctgtagtctggatggctgcccacaactacatcctgaggttcccctggtggcacactttaggaagaaagagcccagacccctggcaattttaggatcagtgactcctggagatggggttgaagtagggagggaggggaacagagaggcctctatgcagagaaatggggggggcggttatctaggactcattttcagagcactttgtggcagttgtccctctgccatgctcagattggagacacttgccctacctctggagcaatctgaggccacttgggaacagggtgagagatggccacaagggggtgctggtgacccagggcttagaggctgtggcagagcacactctggaaatccagccaccttagaacagtccctttctgaagacgtggcagcaacagagcattggtaagcagcagggaattgtagagggggtactggctgctcaagggtcccctctctagggctgagcctctcccgagtatggctccgagctccttggtctttggcgctttcttgagattctcttggtggctacagagtccagtgggcaagagggtcatctcatgaagtccagggcaggctgtccttctgtctgtcccaggaggaatgggcgggactggcttagtgctgtctctacagcctgtcctttcagcttctggctcaagctggctccaggatttcttgtctgtctgtcccaaggcagctgtttgctctagctcagagcctacttcaggcctggggccatgccctaggcctcttgtgggaagaagccaagcttggctagtgacatccccttccgaagcctcataatctcccagaacatcggttcagctgcagacagagaggatagttcatggtcactgcaggcaactgccctggctttgggcagggcagtgttcgagcaccccctctgttctcatcatgggcttagaactatgcttttccagttgcaaatgttttttcaccttgacccagagcagtgaacagggttcagggcatcagtccccgtgtctggagaaggacccaggaggcaggggaaccatgttatggtagccatgaagaaatagagaagagtcacaggacagacccattataaagaaccttgaatgtcaaagccagtaacaggaatgctgtctctgctggccctaggatttctaggagaagaaagagcagcatgacccagatacgtggaaggcaccaggtttgctctcccagtgaagcagaacccatcaccaacgagaaacagggatactttattaatgtacaatgctccctttggctggccttctactagaagggactctatacttttgcctctgcagctgccggacaggtagggtgccttcaggcacttaaccagccccattctgccctatctccctcccttgggcactatcccagaaaagaacacatgggggcactcaccatcctgccgaaccaagccttgctggatatagcgaatgtaggtgaagaagttgcacactgcagtgatctgtaagcagaatgcagagggtgtgactcactgatttcccatactctagggtcccctccaaaagccaatgtagaccctatctcaggacagtaagtcctaggtacctggcagagccagggtgtgcgcgctctgactctgctagagctcagcttccaagatttaattaacagtagcaagactcccagagctccttagagtaactgctgcaagtgcctgtaagcaacacagcaagtaagacacagacactccccatgcccattttaccagtgatcgagactggtaaagtgtggacttaggaagtggtcaagctacaaagcaatcaggcagcctgcaccagcatccaagcttagtcccctgtggacctgttccttcttagcaggaggtctgggcccaccagacataagctaggtgctgtgtgcaattccatgaaaggcaattagagttgctgtcccaggctgccttgttcccaggctacctgaggaccccactatggctagaggcctgttcctgtcaagctcttatgacccttcactggcacagctccaaagactctacagagaggaggtgactctgttgttatcctgcccagaggccatccccaggtctggtccaatctcactgcctctgagggtttgggcaacattgagcccatggtaccctcctttgtggagggaacacaggccagctctttggctaggatggagggagatatgtgttcaggactccctcttgatctagccaaagctcagccctatcttggtttgtctcctttccctgcctcatcctgcttccctcactccattgagaagttccaaaaatgtccacataggctctgcatcttgaaaccagccaagaagggtggtagcaggcagctgggcccacaagagcctctacccaggattctgggacagggaagcctgacatgtgaagtacccagaggctggtgagtgaaagagactgcagggaggggtggtgctcttgctaggctgccaaacacatagaacttgccaagaggccaaagaaggtacagggagctggagttgggggaaggttgcaaaggcaggggtggtgtgaggaactataggagcatcagccatgtgtggctgagcctggtgctaggaaggagaaacaaagtggggggaagggagatggcacaactctgatgccaggtgagcagctggcagcaggcaaccacaaggggctcctgagcatgcagtggcagagtggtagagtttctccctaaggctgcactctttgttaacacttcatccctctgtctgtccgagcaaggatcacatagaccctccattagaccctccttagctctgatctcttctgctacacagctgtgcccagcagaaccacacaccaaagtcacaataaaataaagtactacatatagttaagcaagacacaaggatggcccttctgttgacctgtgggttgggctaggaagggataaaggaacttgaggtcacagaacaaggctctgggcacccaaaggaggagctgcagacagttcagtctgaagactccatgtctgggctgtgcggccctgtttttaaaggccatgtggtagaagctgagggtgtccccggactacaaggaccatcggggacacgtggaactgaattctaccaacagctgcaggagcttgggaaggactctgaacccagaaaagaacccacttagctgagctctgactgcagctggtaggtccctgagctgagtatgcctgggacatcagtgtccaggctcctggcccaggagaaaggtggcagaatataaccacaggacatggtggctcatgcctttaaacccagcactcgggaggaagaagtaggaagatctttctaaaattcaaggttagcctgggcaagttccagaacagtcaaaactacacagaaagtccctatcctgaaacagaataaaacaaaacaaacaaagagagtatattaccttttggatggggatctagcccattaatagagtgcttgcctaccgtgcacaaagccctgggttcagtctccaacatggtaaaaaccaggcatggtagagcacatctgtaatactagtgctttgaaagtggaggcaggagcatcaaagtttaaggttatccttagttgcatagcaattgggttatgagagactggctaaaaaaatagcatattatcttaagtctctatatttatgatcatttgtcacacagcaataggaaaacaacacattgatctggctatggtcagagttaagtctctgcacctctgagagttgttcaggctgtgcttcgaggccagaggtccctgtggtcccaaagaagcccagtgacacttgtgaaggataactcaccctggcccgggatgatggtgagatgtaataatggctctcagagtccccgaggcggattcggtggtgacaggtacgggccaatccactcagggcacacgtgctggagagaacagaggaagtggaaggcactgaatgaggctcaaagaggcaggaaacatgtgctagctagaagatacatggagacttagcccaggaagcaggtgggaagtagggcctgacttccccttccttcctctcccagcttccaaaggaccccagggccaaacaaatcagtgggatggggtgagagtcctcaggaaagaccttaagtgcagctggatccaggcccactccccacgccccttccactctgttccttttcccacacaagcagaggagctcagtcaatttcatgtcatagcaaacataacaaagtcaccctctgcagcctctaaaactgcccccccccaattactggggactttacttccaatcacctctttccctaactgaattctgtcctgactgcctcccacttcccacatagggggttttcatttagccctgtgtggtcccctgctcaccaggcctcactaagaaccccctcccgcagcagggcgttggtagcacaggcctttaatcccagcacttgggaggcagaggcaggtggatctctgtgagtctgagaccggtctggtctacaagagctagttccaggacagcctctaaagccacagagaaaccctgtctcgaaaaccaaaaaagaatgtatttgggctggagagatggctcagaggttaagagcactggctgctcttccagaggacctgagttcaattcccagcaaccacatggtaactcatctgtaatgagatctggtgcccacttctggtgtgtaagcatgcatgcagataactgtatacataataaataaataaaatctttaataagtaaaaaagaaaaaaaaagaaccccctcccatgccacctctctcctcagccatgcctgggaaacccacttagcaccttcagctacccccccccacacacatattaggtttccatggtcccaacagcccatcgtccagcctcccactcccaaatctcgctcctccactagtccctgcctccacaatgaagcctagaggagcacctactgggctccctccccccacgcctgcacttggttgccatgtcctctgcctacatcattcttttgcttggattccctcagttccttctacccactctctactctccttaccctttcttctctgtgttacagccatgactaactcatcatctttccggtggcttccctattgcccaggaaatacagaatcgcaagtaaagggcagttgatagtgtttgttgcctcttccttcactgtgaggctgagccttcactaaaaattcaccagagaactttcttttagggtaacacacactgatgaccccaaaactcttagcctagtgagttagtgtctaactgtccaaaactctgacctaaaccaccccctgagactctcagtcccagctccccactccctggctatgtcctggctctgaggtgtttacactccagcttccctggccttcattcattccattccctctgcctgtaaagctggctcagatgttccctctgtgagccaggcttctcttgtgggcccagccccaccagtacagctctgcaggtaagctgctagggcagtaatttattggcaggagatagagccagatgctagcaatcacttatatgccaatcagagcccaggatctctgtgggacagaagaggagagagaggaagtacagatggtgccagccagaagagacaccacagctagcagcaggaatttttgtaaaaagtacttcctggtcctaaatggggacagtgatgactttttctctcttgtggtttattgttctcacattttaaaaaaaaaagatatatttatttattatatatacagtgttctgcctgcatgtatgcctacacaccataagagggcactagatcttattatagatggttgtggatcaccatgtgctgggaattgaactcaggacctctaaaagagcagacagtgctcttaacctctgagccatctctccagcccctgttttcactttttaaaagcagagttttgtgtatcccaggcttgtcttgaacttgataagaagcagccaagaatgatctttgacctctgatcttcctgcctctacctcccaagtgctgggatgctgccatgcttgattttgcaaggtgctggggatggagtccacgtctttgtacatgctagtcaaggacttactaagctataaccccagacccatgtccatctcatgggagtccgtaggctaagtcataaactatagaagacagtcaccctgaatgttactgtccctactcatctatatcccatgagacccaagaccgaggctcctatcccatttccccagagtgctgcctgaggctccattttggacctccccacatgggcaggaacatgcccagggtactaagcttacttgatgttgttacattcaacagtgggcaccttcacagtgggcagagtctgtgaagccacaggctcgatggtgagtgtgttgtcctccacagcagcccgcaccagagctgagagctatagcagaccagggtagagcagtgagaagctgggtgactgggaacaaatgagcttggtcccccagatagccacccttgacccccttaacccccctcacctcctgcactgtgaagtcaaggcaagggcccacatcctcccggtacaccctttctaggaaggggcagtccttatccagggtaggtgatgccctccaagcctggaactctgaaaacagggtcgtatccacctgcaggggaggggagccgagtgggggcagtcagggatgagggtgagcacctcagagatggcaaagctgatggagaggagagcagggaaatgcaggagggctcagtagaccatcaggcctgtccccagagccaagcaggggagcagagtccaggggaagaggaggtcctgtctgccctttgcaccaaagaatttagaacaacacagtttgtgtctgggtgtacattaagtttcttggcactgcaaaattacagacatggatccagggccttggcctgaatgctgctactgagtccttttggaaaaaatatcaagagcaagcctgtaagaacctgtgggtccccggaacccacaggtctcttcgtctagaatgcacatatatgtacatgcacacaggagagaacatttcacaggtttccctgctgcccactggagggggcaatgatggcctgccctgggctgcatgcacaatgagtgacgcccagaggggagaggaggagtgacccctaaatgagccattacctgtcgggaaaaggagagagaggtagcagagttgggggccgtggggggctccccagatgggaactgccaggtaggctcgtaggtgaggtggatggccttgctggggatcacgcacaggagcagggagagtagagggggcagcccaggctgggccaggggatgggtggacagatggacagacagacagacagacagacagacagacagacagacagacagacacagacaggaggaaggaggagatgtcagtgtccagtgggaagctcagtgctcagaaggggaccgagagagctttgcttgcaccttctaaaatctcaggaagcagatgaagagagttctgagcttggacaggcttgagcaagagccccaggaagctggatctcatcccatgtttccccagtgttcaccgaatactgcctgaactgccttttttgtgtcctcacagttcctcccctggaggagggggtacatgtggcatgtgaaataatggaagtgctaacagctacccaaggactggtcatgtcagtccagtctggaccaagcctccctcccccttttccttgctgaggcaggagagagatgcttttctaaggtcatgcttgcttcagcaccacagccagagtgctaaggacccaagagtacttaagtacagggtggtcttagacctcaagactgtagccacaaaacaccaagtaacccctctccaggtatccagtggcacctgtctgtcactcttaacataggaaatgtatctctgaagaggtttcctgagagaagaccttcaggttctaagatagctcaaattcagagattaccacctcctgcttggaatcagaggagcctgcccagccatcacagttcaagggaccctgaagcccagagaagggagagacaggtggtaagtcccacaggagagggcaggctggctcttccaggatgctcacttggcttgtcaaacaggattacccctcccagttgtgagcccactatagcctgtgcctcacctccttgccatctttgtctggggtggggatatgccctgctgtggggcacacaactgggcagagggaactgctggtactcttatggcgtgagtggccctttcggggtccggccttggtggggctcagcagctgtgggtggagctcacggttgggagaggctggtgtggacgtgatgaccagtgtcttcaaggctgtcacctctgcctgcagcatgtcaatctggcccagacaagatgaccatcaaccccaacatgggttaatgtcatcatggctaccatggcctgtcagccaagcagccccagcagtaactaatgcctcccccaccctttgaacaacctctattctgtagatagggaaacagaggctgagaggagacacgacctcagatcacatcagagactctgctgcaggagttctctgggaacttcttggatctcctccttaatattcagggatctccagaagcaagaatagcccaagcttcacatttactgattggcaagaactctagaaaggaagctgcttgcctgtgctacagccacaacccacattgctgcattgaagccaggaggagaacctgtaataaccactgggtcctcctggactacagaggggccaaaaaaaaaaaagtctccaaggcactgatggagttggagggccctgcactacttaatttcagacccaccctgcctgttcccagacctgggttctcttgttcctgatgcctgtgagggtccgtgagagccctgttgcatgcccttgctagttgagggcagtacaccccatcaagggctgtgatggaagcgttgagctggcctaggcacacagggatggatctcaccttgccccaagcctccttcaactgcttctccgatgcagcctgcttcatgttggcttcccgaaccatcttgtgagcttcctagaagaggggacacctctgcatgagtggtcagaagacaccagacacctcgaccacccctccccgggctgcccagcgaacctggaacaggctggccgtcagttcctccagctcctgctccagctgtgcacgcaccttgcaaagccgctcacactcctcatccttcagcttcagctcctgggtgcaggcaggaggcagtcagcctgccctagccaggctccatctccccagcctggtgtgaagctttagaccaccagttcacttcacaggaatctgacagtctgtggttctctagcccacgcacaagattaaaaccctagcccagcagcccagcagagctggaagcagatttccaaatgcaacaagatgtgtgaaaacatttaagacttctgagacttcagtggcagaatgcgtgcttagcacgcttgaagccccagtataaaccagccttttcctttgagttcccaggactccagtatgggcctggcatgtagcctaggcaagtggtgaccccctctcccttccacagctacctgggctcactcagtccggctgctcttctcatccccccaccctaccctgagcacccaccttctgggctttgtatagttcctccttcaggaactctgatcccttctctcggatctccatggaggagctgcgcaggcgtgacacgtccagtggagcagctgctgagtgttcttcaccctgggcctccttccgggaagcagggttttccaccaggcttcctggggactccctgtgacctttgctggggccaaggtttttccaggggactgagacagccgagaggcccgtggggaggccctcatctggttggggtgggctgcacggcaaacaagggcatcagcacacacaggatgtgaactcaagacctgtagagctgagcgcagggaccaaccctaggccacatacctgtcacctgagcctcagtctgtccatttgtaaaatggaggcactacaagctgtaaccagaatgtcacaagggcagaatgaccaaactctcttaggggccaaggcaggactcaagcacttttgctatccaccatccccaacctagggatgtagcacgtggccagcactaagtccaaactcaattcacatttgttaagcagaaagatgaatataaattcatcaatgcttaggatgagtctctactcttacactataggtagagattgtcccaatgattgtcattcccaagagttgaaggggatgggcagaaaacctggacatggaagatccagctaagtgggagccttcatcaacatagttaaaacaaactgaactttatcaatgacatggcatcgttattggaaatgtcaatatgatagacattcacaaaggtggaccagagaggaagcaccaggcctcggcaggcaggaagattctacaaatagcccaggcacaacagacccacttcctgccacccctggattttgtgagaaaaatccagctccccttggccttcaaacaagcatcccctcctctagaagcctcaaaaccctcgacttgctgaagccgaagccttagaaacactggggctctacccttacccagcccccacctccaagctacagtacccccctagtaagcagatcctggagagggaagagaggaaggtctggccagtggcctttgtgccgagacagcacctctagattcgcttgctcagcaaaatctggggctcctgagccagcagcctcagggaagcagtggcttggcgggtttgggggggggggggctgtgctgactgataacagagggaagtgagggggaggggctctgccaagcctgcactggaaagatacaaggccaaatgaaaggaaatgctagcggctatccctctctccttcctcaagcccatcagaaattcaccatagaacccctgagcctcagtttccctgagtaacacaaagaaagtgagatctcagagaccacagcagtgggtccactgccctgcccagccttctccctgccctggaattggcccaacatgtggccttgaggctcctggaattaggccctgcttggcagggatgtggcctcagtgaatataaggacagagagtcaccattccacctgcctgtggggcagacagattttcccaataccgtggggggggggcaggtcttgttgacacagggtcctagaggcctgaggcccctaacagtgctgtggcagctgtatgggatgagaactctgcccggggactgagagttttgtctgtgtgtcagtgtctgtgtgcttgtgatggtacatgcatgtatgtacatggatgtgaaggacagaggtcaaccttggatgttacccctctggaggtatcaaaaggtctcttactgggttctggggttttctgattgcttaggctggacagggacctctgtttccccacgactatgattacaagagtgtgccaccatgcctggctcaaactcaggtcctcatgcttgcagagcaagcactttaccaactaagtcaactccccagccccagtgtgtgtgtgtgtatgtgtgtgtgtgtgtgtgtgtgtgtgtgtgtggtgtggggatgtgtgtttgtatgtgtgtgtatgtggtgtgggggggtgtggggaatgtgggggtgtctgtgtggctgtgtgtgtgtgtggtgtgtgtgtctatgtgtctgtgtgtatgtatgtgtgtggtatgtgtctgtgtgtatatgtgtgtggtgtatgtgtgtggtgtgtgggtgtggtgtgtgggtggggggtgtctgtgtatgtatgtggtgtgtgagtatattgtgtatatatgtgtgtggtatgtgtgatgtgtgtggtgtatgtgtgtagtatgtgtggtgtgtgtgtatgtgtgtgtaatatgtgtgtgtggtgtgtttgtgtatgtgtgtgtctgtgtttaaggtttatttgtattcatgtgcacatgtatgcctctgcctatgtatgtcatgtgtgttggtactcacaggggccagaagaaagcatcagatcacctgaagctatagtaacaagcagctgtgagatgcctgatgttagtgctgggaacttggatcctctagtagaaccactgagctctcactaatcccacactttgctttaaatacactttacatagcaattgtagtcttttcccattgctacagataggaatatgagctcagagagaagagagggacttctatgggggcccccagcaggcgaggggtagtgtggagacagcaagcaagatcttcagccactggccccagcttctggccaagtggtctggtatgaagtaagtattgcggtcatcacatctgcttcatgatcaagggcttctgggcccagggaaatgcagtaggctttttatgagttacagcagggaagccttacccagtcccagctcaaactagcttattagacccttgctccagcccagaaaacatcctgactagagtgatggcctagggagggaatgaaggggactgtggttaagatcacagccaggctttgccctgggaatgtctgaagttcctggaatctactttccccatagatggacagagaaagcatcaagagagggatgctatcagaatcaaataggaagttacttgttacagcgctacaggtgactagggatcaacctttacttggcaaagattcctgtaatgcttggcctgactctggccctgcagctgaacctacagccactctatcccatgggagtagaaagttgtctcctggagatcggggcccaactccaccttctcgagtgggaaatgacagtcacacccagcttcattcagcagtgtggcctggaccacacacaggtagggtctggggtgggagtgggggtcaggctgaagaaataccaccattccgccagctgtctctgacttcagttcacttccagggggatgggaccctattttatagccataaaacaatctaggaggcccgaggcagggtctctgtggcatccttcctactcgtagaaaaggccaatgctcaaatgttgaaaagtaggaagcaagagaagggcaggaggggaagaaggcacagcaagtgtgtggtggacactccagtctgcagattccttccttctcacttcccagcttcaaggctagttctggtgattcatgaaattcagaggaagaaggaaagggttctacagtcaaactgagccaggctctgggactgcccacacacttcaaccaccatgtcatcccctcaggtctccagtaggtcatatccaccatccctgacctcctcagtctaggttcttgggaatacagtcttgtcggtccaagctctgtggaaatacagccttctgtaaggcctactatgggatgggaatgaatcttctagggatgacagatactaagagtcaaggtcagagttggatgtggtggtacaagcaggtctccgtgagtttgaggccagccagatctacagatcgagttccaggacagccagggctgttacacaaagaaaccctgcctcaaaaacaaaaacaaaaacaaagcaaaacagagtcaaagtcagaggcaaatggggtggccagcatgacccatcctgaagctggattaggagcctagggcccccacatacaggaagtgctctcctgggtcacttccccaggaaatataacgcagtggctgcagccctcagtccaccaggcctgtcctaaacaggcagcggggatttttgtccctatcctcaaagcataactgaaggagaactcctgaactctgtagcctgttagtcactcagacactagaaatccctcttgggtcaggagctcctggccagagctaaacaggattcctcgaagccctttgagcgtctacctctcccagcctggataaaccagcctgctccgggctctttagcaagtgggcatggccctctgcagctctttctccagttaagaatcccttctctcttccaggccacaatggtttcactaaataaacagcagagggggccctgagcgcaactctggaaccagggaaggacgggactgggagcacacttcctattatgcccgaagaagctacagaaatcttgcctggaattgactgggggggggggggagatagtgccatggtactggagcaggattcagactcattcagaagactaagaatgacagacatatgacattcacgtagcagcaacaaggtgccaggcaaggttttgtggctctctgtaagcccagcaaacagtctaagtctcttcaggcccaaatcaacaagaacatagggtttccaggttcctggttcaggttcaggtcagcccaccgcttcaaccaccatgggtgtcgtgatagcactgtagtgagagggactccacagtctaatcttaatgatacagtaaccaagcatgagacaaggttggtggcctagcttggaatacatagtgaagaggtggtaggatgggaactgaccccagactgcaggcacagcacaaacagcatgtgacttgctcctcacaagcaggaatgaatggaggtttcagagaagtgaggcaggatgcagatggggtttgaggaagctcaagtaagggtggagtggtgaagcgagatgcctagggccgccttgcctgccaggcaggaatgagctgagcggggcacacaaagcattgtagggggtcaatgggcatgggcgggggtggggcaggacttgggtaggagggtaggtaaaatatgcagcacagtaattgattaactaagctaatttaaaaccaaaggaaagctaaatgagaatagtggaatgggaatgaggaagtgggggggggggtcttcagggaagcgaaagggggtggctcaggcttttgggaactacagggtgctgtgggtggctcatgggaaaaggcaggacagtggcagctgttgggaggtaccagcggaacagccagcacctgggcctgggcttagggatagcagagggggcaccctgagaatcagagatacatcttgtctctctggtgctaaggatctggagttggtcggaatctagcgacccaaagcaaaaaggcacaagggacaagcagagacaggataggcctaggccactgctggaggggagtggggcagactaggggggggtgtcaagacaagcagcaggccctagtgggaggaagagatcaagagactaagtaggcagccaggccagattcttcctgctactgcccctaggccaagctaggacagcctaagaggggactcaaccctctgcctccccaccaagagccaggccaggtctggataaatgagggttacatgttctgcttgtataggcttctgggggtgtttcctgtacatttagttcagattttacccatgcacacacacacacacccctaagacctctgacatatagcatggacctagtgcctacagtgccagcttctacaccctgatccttcaatagctacaagaaagctcccaggagctaccatggcatccccttctccctacctttttcactttgttccttcccctcctgattccccaacgtttactgagcacatatccagtgctgaggcccagcagtgctctactgtgggtcttatctgatcctgaacacaaatgtgctgggcaaggaacagcaggcaagatacttccatctgttgaaaggccagggtgggtggagagatcctggctgcacaagtccttcccagagggaaggcctagttgcctgacctggagctctcagtcccctgtgacttaggtcttaggacaggagtccttagagcaatgaagtgacttgctgaagactgcagagcctaggccaggcagtggtggcacacacctttgatcccagcactttggggcagaggtaggcggatctctgtgagttcaagaccagcctggtttacagagtaagttcaaggacaggctccaaagctacacagagaaaccctatcccaaaacaaaacaaagcaagatttcagagcctagagacctgcaattctggaactccctagtcactggcctggggcaaaggcatggctcttgacacctagaaggctgggccaactttttttctcagcagtccatcagtagtcctccctagagatgggtctaattagtcccatccagtgagtgggaatctgacaccagagggtcacaccaatgttatatggctgctcagtgctactaaacccagactctggactctgatgaacaaacgtaaagtgtccaggactgtgttaggtgcagaaatttcaaagtatcatcctcacttcatcatctagagtaggcttggcccccaagaccacaggcctatgaagctacaggaaatggagaagcccattatagggtgggtgggggggtggaggatcagtcccttaaagtgagttagacagtaggcatagcagtgcagcaccaaggaggctaaggcaaaaggatcaagaattctaggccagggccagtgagatggctaaatgaggaagggggcttgctatttaagtatggggccttagttcatttcctagagcccatgtaaaagtaggagagtaccaacgtcataaagttgttctgtgacctcaacatatatgtggtgacattttacacacacacaccctgcatactaataaaattttatctaaaagaattctgggtcagttctgggtcacataggtggcaagaacctgcatccaaaaacaaagcaacacaaagtgagactgaggctggagctacagctcagttagtggagcccagcacacacaaagcttgagattccaagcccagcactgcataaaccagaccttgtgtcgcatgcctgaatcccagtccttgggaaatggagagaggtggccatccttgactatacagggaatttgaggccaacctatgccacctgaggcttatgctctggaatcctaagaaggatctctactcctggctcctacagagtccagtcacgtctgttcatccccatttaggaccctgccattaacaaatacccaagagtgatagcttggttcatcttacagcaggaagctaagccctagaaaccctggatttgcttgctgcattagcatgaggacctgggttcagttcccagatggccatatgtacctgcaagctcagcaccgtgaggggacacagcaccataagaatctccagggtatactagccaccagcgtagctgaaaaacaagttccaggttcagtgagagactcctaactcaagggaatacagtggagagagacaagacacatggcatcccctctgacccccatgtacgtgtacacacacacacacacacacacacacacacacacacacacacacacacagagagagagagagagctacagctcgccccagcccagaggaggggacctgcacccttcgggtcttacagcaattgcctcagcccacccagcataaaggctcacaacttccttcagaccaggctgctcctcaaacacacagccctggacaaatcaaacaaatgcatcctcaagcaggattgcctcaacctctgcaggcaccaagaactcaccccaaacactttccaagcctagctagtctctcttcctggagtgaaattccaacacacacaggctggcttctgctccctctaaaagatccaagcctgtccacacctcacatgagctgggtttggtatcctggctggagtggaagtcccatttctttcctagcccttcaggtcaagctcagttggggcccataagagtaaatagatctcacctgttcccctccccaggggcccctttgtccttcttcttatcctgggacagttcttagtaggaacagctcccacccccaccccaagacctagtctttccaggggagggagaaggtatttgcctacattcaagaaaggccatcagccttgtgaacacggggcaggatctcctattagactgaccacgaacagttatcagccttaaggaccaatggccctaacagatgtgaatggggatgaaggatgtggagagggctcacccaagtctcaggatctgtgctgttccgctccattctgcgggtcagcacaaacccatcccaaatctgaaggtttcagtgaactgaccagggaccttggagagacacagctagctttctcaattgcactgctttcccagagttcatgggtgttccctccttcaaatgcgtgccccagatttactttgggatatacatactaccacttattcctcaccccaccccccacttctctcatgcgctccattggagctaggaggagttggccctgtcaccttcccaccctggggcaactaaaatcggtcccgtcaggatcctttcagcgctcgggcagcagcgtgtcctcacagtacaatacacccctccgctgcaggcagggctgggagtacagatcatctcccaagtggggtgcaaacaacagcagtgccccctgttctcccaccctaggcggccagcgcggcccagaccgagcgcagcgccactggcatgcggggacctacccgctccacatcccggcgcccccgctctctgcgttgccgcagccgcgtccacgcgcacagccaactctgcccgggcaccagagctgccctgcagcctgtcaatcgctcccccgccggtctgtcccgctggccgccaaggttcgcggctccgccccaccccagcccttcccctgccctgggcgggtcacgtgcccgagaggcggccccaggccacgtgcccggccccgcccctcttccagcccagccctgtccctctaactgcgtggggacggtgatcccgctgagtgagggcagaactggcccgtcatctctcagtcagagttggccttggcctttcccactcactctgtgcctctcacttctggaccacccttgcttgagaacctacaatggctcccgagggtctcagctatgattctcccgcagattgtcactccaagcggccagacacctcctacacactcagacttctagccgtgttaccagactctgaagctcagagctctgcatcagtccctggacttctgggaatggagtgggggagaccccaaactagtcccattcgttgaagagttaacccaagagagcactactttggctcaacttaccaattctgttttccagggccctccccatgtacctctgaacattgttcatcccagtctttccagctagctctcctccaacctcacaaacacctgtcaatcccaggtatttaaaaacagagctgagccgggcattggtggcgcacgcctttaatctcagcactccggaggcagaggcaggcggatctctatgagttcaaggccagcctggtctacagagcgagtgccaggataggctccaaagctacacagacaaagcctgtctcgaaaaaccaataaataaataaataaataaataaataaaagcagatctgtaaaaaacgaatacctggccactggtcacctgtccctcagtttctctggcctgcctttatcctggccctgatcactaccctgaatgaggtttagcctctgttcatgatggatacaatgagtagagcccatagccaatccctcctgtagtgctgctaggaccagctcccacaggctgggtctacagaactctctgggcttctgagagagaacacaatctcaattcatccatccacacaaagagacattctgctgccccttctgagctatctaaggaccatgcaatagcaggagaccctctaggctggaacccctccctccctcctcctctccctctcccttaatcccctcttctcagtgggtgtgagtcatatattacctaggctgatctccagcttctggactgcaatgatcctccctcaacttcctcagtggctgtgaccacaggtatgtaccaccatgcttgacttatggaatccagtatggtggatcataggtgagagacctgctttcaagggcctctactgccagagcctcaacttgcctaggacccatcttcaccaacacagtgtcacctttcaaaacaaaaacaagtttaggctggagaggtgactcagccagtaagggcatgcattgcttttgcagaggacccaagtttggttcccagtacccacattaggcaattgatgacctcctctgactccaggtctgggggaccctaagccctcttctggtcctaagggcacctgcatgaatgtacacaacccacacatggacatatacacatgtaaatattttttaaatagaaaagagtgctcctttcccagcttataggaacaagcacttggtgagtgaagccaggctggaatccgtgtcttttcccatggctagcatcttatggcgtgaagaaccaggacagccctccaaagcatccttctcaccttgaaggactctcagtccaggtctcttgtgtccttcactctctatggggtggctatcaggctatggcatctcctgggtaaggaccaaccctttcttggagctaaattcctccacccagcccggcccagtttaggggctggcccaaagcagatgtcaacattttgttgttgacttgaacccttcaccagctaagccttgagcaaatgctgttttcctgctccttgttctggtcattatccagggggggaaaggaaaagaagacaaaaaaagagtccaggacagggtccttgccttccaaccctttaaaagccagggcaaagataaattatggcagtgggattagtgagagataaaggggaggaggtgtcagcaaaggtctacagtgcaggagagagaggcctcaccctgggagcccttgagggaagcctcaaaggacaagtgtgtggtcatcactctaagagcattgacatgcaattactaaccaaaaatatcctgtcatctatacatctagactctgtgaactcccaagccatacactttcctccaggcagcacagggaacccttctgtgccactggaaagggatggactcagagaagttaaggaatctgcctgatgtcacacagccaggggtggtgaggttgaatcactttatagcagtttatccaagagacagcccagaaccactggtcttgctggaagctgcagctgggtacagacagccctcggacggttgctgaacatgtactaggtgcctggcccagccagttggaagggagaattaaagatgtgtctatatcactaaccactgaaagcctcatctccccctccttcccacaccaccacccactgtccattctcccctccccagatcattacccttagccacagaccctaggctgagactgaaggcacatgagacttgggagctagctgggacagcagttaggtctgtttctagctgtgacctaccatgagtatcttgccctctctgaacttcagcttctactttagtctgaccctcaggttggaccagacaatcagggctcctctctgagtgcccaccctataggaagctcctgaaattcttccttattcaaaaatagcccattctgacccccatgtccctgcagagaagcaagacccatccccccacctcctctcagtgtcccaagaccagagctcacctgtttgcatcccagggctcctctctacagttcctctcaggtacaggacccaaacctgatggggcatagcggacagtgcctgagctcatggccaagaacactgggcatgatccccgggcagggcactgcctgggctcctccgaggcttccatgtctaggagccagactgaggtccctttggacaccaccaggagggcaagcagcggagcctgcctctccaagccaggcagagcctcacactaacctttgctatctctcaagagcagcagcccagtggccgggtggggcctcccagacaggcttctatcttcttaaacccttaattattaactcctaaggctcatcgagcagcggaagacatgggcctccttcctgggttgtgggctgtgagctggacaagattcacctaggagcaggagggaagctactcccccaggctgatgcccagggcttcaaatcccttagagactgcctgttccctgtcctccctggctgaaacattgggcagagcccatccaacctggttctattagcactggttgcttatttgcctttggagagctactcagcagccccttaagcacttgaactaccatcactaaagagcaattcaatgtcgtttcagcttctctctgtgcctctgtttccataaaatggattgtcagcctctaaggcatatccagccaactgccattgccttttctttccaaacattgtcccccatgtcccctctctctttcttctgagcagggtggtcatagtaatgctgggatttaggccagagccttgtgcatgcaagataaaaaccgataaaagataaaaaaagccacacacccaatccttacaattaacgtcaacttccattccattttgtccttttcaagatggaaaagatttcttccttggctgcgtgaccttgcaccagttggttagcctctctgggactagccccttgtctataaaataggaactattcttccctatgggagacagtagtagccttcatggagggtctgccttagtatcacaggagcatcccctaactccctcctcccctattttcactattgtctctggtcagcctttaggtccttctgggcccctccccaccagcgtcacaccccgaccagccggccagccagcggataacagtatctttgctcagctttgggctgtaaagcctgcttagcctaatgtaagccagatgctggcagagggtttcctggctgtgaattttccatggcctgctcccacccccttcctgtttttgcttctcgctcatccccctactaaattctccagtgcccccaccttcctctgcagggcaaccaaggcctcacctggaaaccattagcagaaaacaggatgtgcagaaagggagtgtgcatctcctaccaccctgacccaaccctgcctgcactgggccaaaggtatttggggggcgacccaaggtgaagaaactgagtcagaggtgctggggacctcacaaagaaacaagatgctctctgggcatttgcttagaagggagggtctgtgaaatcctttgctgagccagtaaggggttaaccttgtccacttgtaaatcaggaaactgaggcttgaagagtcatccagggtcactgtcgaatgggcaccaggagacagttggaaatgggccagctggcaacagagctgccatctagtctctctggggctgcttgtttcatactcgtccctacctgccctccccctatggcttgaggttgagcctggagtctggtcacgaggggatactcccaaggcaagaggtagctgcccagacctggctgggcaggctctgaggtagatggatctacttctgcaggagagccacagggtgaccttgggcaagcaggaaagtgtgagcagagaggactgctttgtctgtcttccttgtgagcctttctaggcagcaagggtttgaacacacaccccaccaggtccctctactcccccagcaaggtctcccttatttccatgaaaacaacgcaacctctgggctcctgaaacctcctctggctgcccctccctccaccagctgtgcagtgtttggacaactggatggaatgttctgcggccagaattctccctggatctccgagctcagatttcaccagggagggagagaatgatgttggctccaaggagagggaagagactggggagttcaaacacaggcctggacaccccagtccctatgccctaaagcctgacagagatgactgccagccgcccctgttccactggggctctgaagtctggccaggatcttagggaaaggccagatggctggtggaggcagctgcatggtgtcaaagatttggtcagaccagtgatgaagtcagaccctggggacagtccgggttcaggcagagctgggtgaggaacagctcttggagaattctaagaatgtgaagatcacattaacgtagatctttccatcccacagtctctccattttatagataagacagctagggtcccaggggtaggtgtatttgcctaagtggacacagcatgcttagttagacctaaaactgaacgaggtctcctgatgctaaacttgcacttcttactatccagggagtcctcagccctagagacacacatcatcttaatcttcctcaaaagacacaggagagacagtctctagtatatggtaatctatgttcacaaaacagtagatgctgagtgccagagtggcctctaggagtgtgccattggctgcattgtggaccaagggaggggctctgagaaccaggacatcttcccccattctcctgctcggtggtccaggctttgttcccctctctagcactccccactcccaggacctgatgaggaaaccttttctctgtctttgaaaactcacaagtgctgggtgttggtggcccatgcctttaatcccagcactcgggaggcagagacaggagaatctctgtgagttcaaggccagcctggtctccagagcgagtgccaggataggctctaaagctacacagagaaaccctgtctcaaaaaaccaaaaaataaaaaaataaaaaaataaaaaaagaaagaaaaaagaaaagaaaacacacaagctctagacccaattatagcaatgctagtttgagcctcaatttacccaccttaaaatagggtagggttatctttcatttaacttctttgtattgaggttaaatggggtagagttatctttcatttaattcatttgtgttgaggctgctgatggttgggtgtattgggtgctggtggacctctttgggggacttaacatggagacttcggaaactgctggagctccgacagagggaaaggaaggagagcattacttcaggccaaacaggtgtgtgaaacacatcctggtgcccctggggcctgggctggttcccagagatgaaatctgcccagagggaaagctcacccacctgatggaggagtttgagagccattcagaccttcagggaaagacaattatgagaaggtatgactggagtagtagactctatataaaggaatgtggggcgtggcactaacctactaacataggatgtcatgcccatctaatatggtcctcattgcttttggttcctattttaaaggtgggaactggggtccggaggcataactccatggtacagcacctgcctagcatgcataagaccccaagtttcatctttagtaggagaaggtggtggggatgaagacaccaggaaggctaaaggataaggccaagagcaaacaagtggagatacttcgaagctcacttcctcatctctccactttcacctttccaaaaagaggggtaaggtgagtttgtttttgagaaaggtcttatgtagcccaggctaatctccaattagctatgtaacggaggatgaccttgaactcctgtagttctgggattacaagcatgtgacaccaagcccagtttgtgtgtgctaatgattaaatttagggcttcatgcagcttggttcagccctctaccaactgagctacatccccatccctgtgtctgggttttgttttgtcttctcatttatttagtttggaggggacatgcacatgccacagcacacaggtggagaactactttagagggtcagttctctccttccacccgtgagtcacaggaacccaactcaggttgtcaggcttatcagcaagcgcctttaacccactgagccttcttatcagcccaagtttcttgtttttctgaaatggggtcttactgtgaaacctggttggccttgacctcatggcaacgctcctgtcttaagctcttgaaggctgaaatgaggcttgctagaaacagttgagctcgaggaataagcaagatttaaagaacttcttagaaacagtatttgtgcttagggaccagcacatttgagaatggcaaaagcaaacacatccaaggggaggtgcaggggcaaacctttcatcctgcctggagcttgggctcaatgtgtgtttgtggggggtggtggggagaagggagggggtttcctgaaaagttaggaaaagagtagcaggcttgcagcaccagaggccaagctaaatgctcttaggagcactgtttacattttgttttatttattcattcagtgcagaatgatccagaccctgctggcagcagaaaatagaagtgaccacttactcatcaaatctccagtgagggaatcttggtcaactggggagtagtggacaggatagacaccaaagagaatcaactgatctgttcatattaacactgaaaagttttcctcaccctcatcacccatggcaaaaataaccaactttaaaaggtaaataagcttagccaagggcaaagggatcacatctttaacatatcaagaattcacaagagtcatcgagagtctcactggaggccagcagacagtcatgttatgagaactgacactggagagcaatatgttagcggtcaagagagcatctctccattcatggagtacaacctaagaggtggtggtatgtagacagctgtctggaacactgtgatgaagacacccagataagggaagtatggggtactctcgagggtcacccagcaatccctaacctggacctagagtccagaaaaaaaaaaaaaaaggttgaagggagggatttgggagaggaaagggaattattagatgatacaggctaatgtgagaattagggactagattgtggaggtggggggcggggtatatcttgagtttagacgttctacatgagggcagagggaagtcattgggagatttaggcagatgtgtgatgtgactttgtttcatgtctcaaaagggtagctctaagggcccagcatggcgatataggcctgtgatccctgcacttgggagatagaggcaggaagatgaggagttctttagggtcagctttggctatgtaagtttaaggtcagcctgggcttcctgagatcctgtctcaaaagcaagaaggctcctagagatgcatgtgggatcaccctggcatttccgttcctcataatgtgttggatttgaagcagtgaggagccctgctgttactgaaaatgaataccctaaggcaggcatggtagagctcatctgtgattctagctacttaagacaggaggttgatttaagcccagagttgaagaccagcttgggcaatgtaatgtgactctgaacaaacaaataaatcctagagagaggccatgattctttgaggtcttgtctgccaagatctccaaaggccatctccttccttacacagaaagtaaggatgaagcagggacaggaccagcagggagggtgggagctgaatgtggagcagctacatgcatccagagcccttgaggagagacatggtattccatattggtgacatcctttgacagaactatatgtgaatcgttggaagaaagtatctgaatttacttgtacagaattcccattagtcaataatgaacaaagagctgtcaatccaagatcaccagcacaaaaagatgctagccacagtaagaggatcagcagaagcaacctatagattcttttttgcaaaacagaaaagttatacatgaatttaaggtaaataagcaacatgaaatcgtaagaggaatgggaaaagaatttaaatgaccaaatgaatatttatgttttcaaaataaggagtcatataacaaattagacacagcaagagagaggattgagtctctggaggctatatacaaatgtaagaactgggaagagtgctgaaaactttgtcttctgggcccagcacagctgctgtactcatgaactcacggttacctgcacaagagtgggaccttcaacatttcatcttggatggtagaagtacttataatgtcccacccatccctgatgggctactggcagctgatggttgctgggagagaaaggagtaattttcttctgcagtgtagccactatagttacccataccctagtgaataacctcccaccagtgctcatgcaagcaaccctaactaaacacagtgggtcacacacaaaaaggaagacatggaagttacagggcaactttctaggaaggagaaggaggggcatgagaggagaatgaggcagaaatgactgaaattcattatgtatgtgtatgaaactgtcaaagaaaaaaataaaaatagaagttaaattcatcagaaagttctaaattaatagaaacctaataaaatatttaaagcaaaaactgtaagagctgcaaggagtaattagatgaatctgccatcaggggacgagtatcagcagactaatggcagagctgggaagcaggatgccagggcttggcagcatcagagacatctgcatttgcagtagcagcctaagcatggagcactggttccaagcaaactgagaagcaattggattaatgagtctgttcccttcatgccactcggaagttgccctttctgaatcctgcaaaaggctggaaattactctctggagacagtaaaacagagtgtctttggacctgtagctacctgagggagttcagcaattgcaggcatgctgaaccctgagatccaaccaccaccaccaccaccaccatcctcccccctacacacacaccttctctcacttgacttgtcagaccttcaccctccaaacacccctctttgggactctggccaacctgagaaagaggcctaagactagtgtgaccatctggctaaaaacaagtgtatggaagctggccatggtggcacacacttttgatcccagcactctggaggcagaagtaggcaggtttctgagttcaaggccagcctggtctgcagagctagttccatgacagccagtgatacacaaagaaactgggattaaaggcctatgcctttaatcccagcactagggaggccagcctggtctccagagtgagtgctaggataggcaggctccaaagctgcacagagaaaccctgtgtcaaaaaaaaaaaaaacaaacaaacaaacaaaaaaaaaaaaacagcacagggaactggagagatggctcagtggttaagagcactggcggcttttccagaggactcaggttcaatccccacacccacatggcagctcacaactgtctgtaactatagtccaggagactcgagattccacaggcaaaacaaaaactccaatgcacattaaaaataggagcattttgtcaatattttgttttgtattgagatggggtctcgtgttgcccaagctgaactcaaattcactacagagccagggacacatagccttggattcctatacttcttgcttctatttcccaagtgtgtgaccacaccctgcttccatcttgtttatttttgatacaggaggcagggtcttgggtcttgctaattagcccaagttgatcctggagttcccatcctactctttatgccccttaaagttctttaattttaaaactcattcttatacctgggagtggtgacacatgcctttgaccccagcactctgaaagcagaggcagatggatctccgaattcgaggccagcctggtctacagagggagttctaagacagccagggctacacagagaaaccccgtctcaaaacaaacaggtttgcattacatttacttattgggggtgggtgttcatgtgtgccacagtgcacatgtcagtagaggacaaattgtgggaggtggttctctccttccatgtgggtctcaggtatttaacttacggtcatcaggcttggcagaaagtgcctttgcccgatgtgccatctttccagctctacttccacagttcttagctataaaaagacaaccaaagattatcaaccaactgtgggaagccttctaatggtgggggggtgtccttctgtatgtatgtttctcttattggttgatgaataaaaccctgattggccagtagccaggcagaaagtataggcagggctaccagacaaggagaattctgggaagaggaaggcagagaagagctgccaaggagtcaatcatgtagccaccaagaaggtaggatgcctgggcattctctggtaagccaagaccacatggaaatacttagattaatagaaatgggttagtaattaagagagagatagccagtaagaagcctgagtcatcggccaaacagtttataattaatataagcctctgtgtttatttgggggcaaaacatctgtgggactaggtgggacagaaactctgtctacattctaacatgaaggaaaccaaacccagtaagttaaaaataagtgaataaaaaggcagaaggccctgagctactgtctcaaggcaagcaggcaggcaagcaaagattccaaaatgagtgacagaagacctgatgaccccgcatgccctcatgtgaagaccactggcacatcaccactggctttctaacacagattctagttttgcttctggggatctgtctcaggtcctccagcttgcaaggcaagaactttaccaactgggtcatcttctcacccaatctcctattttaacccaaggtgctcattggagaacggcatttttatctaccaaataggaaggcaataactaatatctcaaactgattactaaaaagccaccagtacagatttgttttagaaatatggtgatgtgtaagtcccagaaactagaggggaacaagaagtggtgggggtggggggctgaagcaaaacacggaagcattcagtttgtttgaggttttttttggagggggggttgtttgtttagtttctgtgtagttttggttgtcctagaactcaatatgtagaccaggctggccttgaactcacagagacacacctgcctctgccttctgaggtgctgggattaaaagattttaagatttttgctgttttgtttttgtgactgtgtgagcttttgagttatttacacatgtgctgtagtttgggtttgacatatctcccccaaatgctcatgtgttcaaggcatgggccccagtttggtgatagaaacgttttaatttttatttatttattttgagacagggtctcatataacccaaggtgactttgaactcaaaaatggctaaagattactttgagccaggcgtggtggtgcatgtctttaatcccagcactcaggaggctgaagcaggtggatctctgtgagttctaggccagcctggtctacacggaaagactttgtttcaaaaataagtaaagcaagataaagacagtaaaggtgattcccagaacaactactaaatgaactcagagatccaagtgaaaaaaaccaagagtctgaacctgacaaacttcaatgtatcagagaaggggccaggcatggtactgcatgcctagaatcctagcatttggaaggcaggccagtgaagattgcaagttcaaaacccgggctatacaagtcccaggccagcctggatctgtacaggggttctatcccaaacagcaagctctacttccagcaagggctggagatgcagctcagtggtagaatgactgtctggcatgtgcaaggtcctgggttaacaacataagcatataggcaatcactgtgattggtttaatacagagctgaatggccaatagctaggcaggaagaggctaggcaggacttctggggacacagaggattcagggaagaagaaaggcaggtcgccagagaaacatggagaaagcagcttgagcagtacaaagagatgaggtaatgagccaagagacagaacataaaataaatatattaattgaagttataagtgttagtgggacaaaccgaagctaaagctgagctttcataattaataataagtctctgtgtcattatttgggagcttgcactacagagaaagatttactacacctgacttacatacttgcctcatgatactaagggttttggatatagcacaggaatagacaatttctctagcatgcacaagacccacaaacaaaacacacaaaaacatgacactgacaaacaaggacagctacagagcagttacagttccatctgttggcaagactccaaaagtgaagtcaacaaaacaattctggtggcagtactatcaaaaaataaagagaatatttttaaccaagagggtatgtaagacttacacactgtgctgggcatggttgcgcaggccattaataccagcacttggacaggcacatttctgtgggtttgaggccagcctggtcaaactagttccaggacagccagagacactctgtatgcaaaatattgttgaataaaagagacctaagttaatgaacagatagcccatgttcacagacaggaagactaacgtgacatacatgacagagtgacctacagaatcaaaatcatccagtcaacaatcccaactgtcattcttcagagatggcaaggagatcctaaaattcataggaatttcagggcaccttgaaatgggtcattgaaattgtcaactttgacacaatctagaatcacttcagaagagtctccaagagggattgccgtggtcaggttggcctgtggcatgcctgtggaggattcttttgattatattaactgatgtgtaaagacccagactgaaagtaggagacaccagtccctgggtttgagtcctggactgcataagagcagatgaggagagctgagctgttggctcaaatcattgtttctctgtctactccgactgccttgacttcctcaaaaggatgggctgtgtgacccagaatcataagccgaacaaacccctcttccctgaaagggttactctcaggtgtttcatcacagaacagaaatgtacccaaagcacatcctaaataaccaaagtgggagaacccacacttcttttttacatttgcttatttggtgtgtgtgtgtgtgtgtgtgtgtgtgtgtgtgtgtgtgtttgtgtatgtgtgggtgtgggtgtgggtgtgtggtggggtaggaaaggttggtgcccatgtgccatggaaaaagtgtgaaaatcagaggacaacttgcaggaataagttctctccttccacttgtgagttctggggattgaacttaggtcatcttgcccacggagcctaactcatactctttgatttcaaaacatctttcctaccactgtatacaccagggcttggtggtgcgtgctgttacgtctcaagccctagaacaaatggctgagatgcttatatatcatgactaaaaatttaagattatatatgttctactgtctagtcttatgccaacttgatacacaaactatagagttatcctaaaggaattgagaaaatgccttcataagatccagctgtaaggcgttttcttaactagtgattgatgggcgaggacccagtccattgtgagtggtaccatccctgggctggtggtcctgaattctataagaaagcagactgagcaagccatgggagcaagccagtaagcagcacccctccatggcctctgcatcagctcctgcctccaggctcctgccccacttgggttcctgtcctgacttcctttggtgaatagcaatttggaggtataagcagaataaaccctttcctccccaacttgcttcttggtcatggtgttctgttgcagcaatagaaatcctacctagatagaagtctactcagattaacaaatgatgacttaaggtgtatgtttgactacttatgtctttgctaactgatcagcatcaagcttctagaaaatttagttaaataacaacatatgtctgataaataaggtgtatttgataaataagatttataaggctgggcgttggtggtgcatgcctttaatcccagcactagggaggcagaggcaggcggatctctgtgagttctaggccagcctggtctccagagcgagtgccaggataggctccaaagctacacagagaaaccctgtctcgaaaaacaaacaaacaaacaaacaaaaaaaaagtttatcttcaattaaatcttcaactcaaacttttaaagttcaaacttaacagggataaagctataaaatcataatcttataaaagttactaactgttatgtaattcatgtaacgacaggctttatttagcctcctgtatgtgttttcaaggttaagcctaaaatcagatatacttaatagataatggtcttcaaaccttttcatagatcagttgattatggatggcacttaaggtgtttaatggaagggagaggtgagacaagggaaccaggtacagcagccaggaggccccaaagtactaaagggatggataaccaaaatggttgcattacacagggaagagcagcccagccacccccaccaggctggagagttcaggatacagggagggatgtgcaaaccagtaggaccccctaacagctagggcctgagagatgctaggagaacctgatagccaggttagctttgatgtattaaataggcacctcagccatttgtcccagggtttgagacttaacacatacctgtcattttagtacttgggagacaaagactgggtatccctgtggcaagttggctagctagactagccagaatctgtgagttctagattcagcaagagatcctgagtcaatgaagtagtgagctgttgaggaagatgctgacatcaacctagggcttcaatatgcatgcacacacatatgctcacacacatattacacattcatatcacacacacacacactacacatacatacacatgcaaaagaaaaaggaaaactaaaccagacaaacaggtgtagtcttggcctcaggacagacacagagatcaatggaatggaacagagactccagaaatagacgcatctgtcagactgatcgttaacaacagtgccaaaatcgtccaatgagggaaacaaagctttccaataaagagtgcttggacacgctgggtatccatactcagcataagcccttggacctttacttcacactatctacaaaaatgaactaaaaatatgtcaaatcctaagtgtatgagctaaaaccataaagttctccgaagaaaacagggagtaagcaaatattcatgaccttagatttggcaagatcaaaattcatgaaaattaaagttttatgtttcaaagaacattctcaactaagtccaaagagatctggagtatagctcggttggcagagtgcttgcctagcatgcaagaggccccgggttcgatcctcagcaccttgtagttgggcctgcaacctcaacacttgggagatggaggtgagcagattaggagtttaaggtcatcttcagatacaaatcaagctcaaggactgcctaaaaaacaaatgaacaaatgaattcagtgttttgaaatgtatgcaataataaactcctctcatcagcactggaagccaacctctcaacctaggttgtacactggactcagctggagaacctgcttaaaatgcagattcccagttgacaagatggctcagctggtaagaacacttgcagccaagactggattggatgcctgggccctacatggtggaaggagagaactaactccccgaagttgtcctctgacctctgcatgtggactgtggtattcaagcacacacacatgcaaactaataaataaacagaactgaaaaaattaaatgcgggttgtgactcaggggctctggaatggagcctgagagtcctgcatctctaacaaacttctgtatggtgggcatgctaaggggcctctgtgtagagtctatgttctaggaggagatggacaagtaaagcaattcactgaagccaaagagcccttggagaaaaggctatgctttctagaacccctccccctcttgggatcttaggctatgtagtacatagtcacatcaggaactcactcatggactgcagaggtggctcatcagttaagagccctggctattcttccagaggacctgactttgatacctagtacccacacggtgactacaaccacctataactcaagtcccaagggctcctctaccctcttctggctgcctcgggtaccaggcatgcattcagataaacgtgcaggcaaaacatccatacacataaaaacaaaaccacagaaataagaaactactagctcagcattacagtacattctcagaattcagaggccttggtttttaaaagaaattcactaaacaggtggggatagggtgaaaaggttagggttagggtcagggcctcacctggctggtctccgcagggtgaggtccatgaagcagagcacagctcagggatcccagctctcccccagactggctgaattctcaccacgtgtctctctttgggtcagttctggtctattctgtactatctcattgctattggctggctatggcttggtgatgctggactgacttgtgtcccagcttttccctgcctcccattgtccctgttgtccctctgaaagttatgtgtcagtgtccctaagagctttagcaatcagatctgcctggtgtcaggaaagaggtgttaactatcttctttcctgtctctggagtgacactgtgtgtcctctgcctccctgtccagctgtgttcacctacctctttcttctcttgatttctgccctatttattctgtgattgacacaggagaggagagtgagctggcaggcaccctataaagagcctggagacagtagccagcccccccaggcccacaccagggcctcctgcctactgccctctgccaagtctggtcctcttctacctgcctggcagaagtcaggtcctctgtgatgctcttgtcaccatggtgatcctagatgaaaaggctataatgttctgggtctggaaccttcacccgtcagcccagctgtgctctgcctgctccctgacatggctctctatctgggggctagagagcatgagctctgctaccatcaaagtattctctgcacacaccccattcttcagacctcccttcaaccccaacagagaccctaagaggtaagcctcaggtcgtggatagctcggcagaggtgatagttgggggttgaaagggcctaggatccaaagtcagaaggcttatggtcccagatcctagtcttagatcattggtagtgatgtgaccttgggcaaaaggtctgcattgagctctagtgtcccctgagtgcttatactcaacagtcccccagcaattcttccgtgacttgccttgggctgttcttatgcacctcacacctcagcgctgcgagctcctgtctcaagccccaacttcagtgctcccactctgtaaacttccctggtctcttgggcattgtcctctcattctctgctggaggttttttttaaatatttctctagttgtcactcaactctgacttcttagaggcagaagttagaatgaattctatgctggcatcagagatgttttgttgaataacttctttgtggcatagagagtaagagagaatggtcttggctgagttgggctccctccttgcagaggtcattctggggtcctgcacccaggtatgtctttggcttcactgttacctgaggcctgcttggttgctggtgacattttcgtgtctgagatctgtaggagagcatgtcttataatggagtgtgccgagagtggagtgagtccaggagcagctttttcacagaaacagcttgttccagttgtctctggaaaaatcttggcacatctgatataggcagggagcagcaccaggagtgatttatagggattgctgaactaatgatgaggagtctgagcttcatagaaaagggaagaaggaatccagcacctcccagctctttaaaaggactcaatagttactggtaaaggtcagggagacaacagagtcttccaaagtcagctcagatcttcattgacacctggatagctggagcaggcttccccggcaagaaccaagtcaatggtgccctctagtggctaaaataagagatgcaggaatccaccaaaggcagagtctgggtctgtgggtatagctcagtgtgaagggtgcttacactgaattcccagcgctgcacaaactaggtaacttagttctcaggaagtagagacgggcattagaagttcaagatcctcctaggctacatagcaaattcagagttatcctgggctgcatgagaacatgcctcaaataacaaggggagtatgtatacacatgtacacatacatgcacgtggaggccatggtcatcattggttgcctcatggctctccaccttgtttgtttgtttgtttgtttgatacaaggtctcactgtgtatagctggcctggcactcactctgtagaccatgatggccttgaactcacaaagatcaacctgcctctgcttcccaagtactgcaatcagagacatatgccaccacacctggccaccaccttattttttgagacaggatatattcactgaacctggagtgtacattgactagaatggctggccagtgagttccaggtatcctgctatctatgccactccagcaccagggggacagaggcatgtcctaccctgatttttcacatgggcaggtactggagatccaaactcataccttcatacatacatggcaagcgtcttaaagtgtgtgtgtgtgtgtgtgtgtgtgtgtgtgtgtgtgtgtaaccacctagtaggtggtaagctgtcttccgtgtgccagttatgtgttggggcaaagaaaaaagcaaggtaagagtccacagcgattctcaacccaggctatacattacaactgcaaactagcacctgggccaggcaagtcttcacctgtcaggtggggcacaggcaccatgctctgcagctcctctccaggcctgacttgtcggtcatcctcactctcatcctgccacagggcagcacttactctcaccctctttccaggtgaaaaacttgggctcacatcagtcctgtcccttctctgttcaactaaggacagggacagggtgggagggcggggtggctgcttctcctccaaggttgtcccaggtctcagcagactctcaggataacaccagctttattgtccgctgtgattagaaaagtagtcaaggtcatggtgaaatagctgtttccccccatttctgggcagagacttatacaggccagaatcacctgcaagctcaacctccttagggagtgaagtggtgtgggaggggtgagtacagaagcagagagtaggagggtggatttatttgaaggctcagggtcaaacagtaaattggggcttccagaagtgtggttcccaagaccacccaaatcacaaactcttgataaaaacgcaacatctccaaggacaaagcatcagcctcctgggaaacagtggagaagctgcatatttggtaaatgtcttggcaactgttgcagtcagcaaagactgagaaccaatgttccttgcagtctgtgctcttcgtttgagatgagcttgttggtaaactcccatcttagcctgatgctcagaagagccttcagaaaggcctggtgtgctaaggtctgcccagctgtgagatgccacccagctgcccctgggggcttgggcgtgtgtctttgtttttctcaggctgtctggattaggttgcttggacaacaggttgttagttttctcccaccaagccgggtcaccacagggggccttcctgtcccccttctctttctctacctctgtcttctctttctctacctgccaaccaatcacagccaccacaacctgtgatgtcatcatcagccaatcagagcttctcaccagtctatgcagattgctgtctcttactgtgctgatgaaattccaaagcaacacatccttttgagagggggatgctgaggcccagtcagggctagcacataggtcactagatgcaggtgatgtatggcagtgggccgtagttctttctggaggggtccccagaggcctggacaagactcctttccctgagctcctgttaccttagataaagctcaatcctgcccccaactttctctgaaagacctcagaagtcaggacatcatggtgatgacacagatttttcgattctgaagtttagagctatggaagagggggtgtggcccctaattctagccctgttcttagctcaaggcccccaggaaggaattagaggaacactgcccaggcggtaatggctgctgctccaagcagattacaggaggagccaagacaagggctcctttgtgaaagatttggcttagaaagtcaggtgacaactcagcacatacgtaggtgggcagtgccagcctccaagtatgggcaggggtacctgcctcagggtctcagagagtcccatcaacccagtggccagaacttttatggggttgcctgaacttccggacccccacctgtgagtaggggttgccccaggtgaacagttctggggctttgcgggactatagggatggatgattgctcttgtatgcaggtgtaatgggcatatgttggcagtgtatgtgggggaggtggactctgtacagtggaaagggggtgtcaagtatggctttagtcagtttgcattgagcatctgctctaggaacacactgagagcttccagtgggagaagagaacaaacagtaagcaggaatgtcctatgccacatgacttcccgtagagccacacaccaggtagacagatgaagcaaactggaaagacaccactggtgacaactgaggtattatttccagtaggatggctggggacatttttcctagatgacctaaagtggaagtgagccatggggttacctcaggaaaagcattcatcccccgagctggctttatcagcaggtagaaaggcactggggtcaccatccagtacccattagtaagacattccttcctgctggggataggaagatggccatgagacagggtccctgagctacttactccagtgtagttgaggaagctgggaaaccaggctaagaactcacgacgccttgttctgagaacctgagctctgtgtgaacattgctgctgcccttgcagacacttttgtcattatacaaaatcaagggcacatggcaattcacagacctgcccagtgtcttgtgttcctacctcatccttctgtgtcccaggctagaaaacggaggccccgagtagggcaggatcaaactcaagccagaacttagtctttgattcctacccatctccatgtctccctctgcctgatgaccaggacccaagtccacctactgctgcccagtgacaagccatgactgtcacctacacaaacaaagtagccaatgcccgtcttggttccttctcctgcctgctcctgtgctggcgaggcagcatctacaagctgttgtatggggaattcctcatcttcatgtttctatattatgccatccgtggagtctataggtaagagagtctgggacaagggttggaacttttgggggcagggtctccaagcctacaggcagagtagaaatgggagtggggactagtgaagattggggaggagaaggcccaatgctccaggtagtttacaaggctgagctgaactcctggccaatccctggtcactgggtggaggctggcgaggaaaaaaaaaaaagacccagagttgggcatgcagctcagagaaatatttgcctgatatgtgtgtcatcttgggcttgattcccaacacaaacacacacacacacacacacacacacacacacacacacacacaccacataccacacaaatcaacaaatcagaccagaggtgacgactcaggaactctctctctccaacccagggagggacctggagcacaggcctgagctagtcctactgagacactcaagttgtaatgatacagtttaatatgtttcgataaaatgtttttatgaacaatagaatgttacataggtacagtcatagaatatctgctgacattttaagtgaaaaagcatgggctggcgagatggctcaggaagtgaaagcacctgccgttgagcctgatgattcgagctcaatcccaggacccacaaatttcaggagagcgccaactcccacaagctgtcctctgacacccacgtatatagtgtgtgcacacatacattcaatctctctctcacacacacaagaaataaacacataaataagaaatttaaaaagaaatcatatctactatgtattgaaaaatatcgaatgcctgcaattctggagtttgttctaataacagcgcactggtacttagtactttaaaaattagaatttaattaattgcctttaatttttagatttttaaattttattttacatgtacaagtgttttgccttcatttatgtctgtgtaccatgtatgtgcctggtgcctgtggaggtcagaagaggacattggattctctagaactggagttacagatggttgtgagctgccatgtgggtgctgggaactggactcaggtcctctgcaggagcaacaagtactcttagccagggagccagttctccagtctccgataattaattctttgagataatgtcttgctatatagctctggctgtcccggaactccctatgtgagactggccccaaacttgcagtgcggtactcctctgcctccaagtgctgggatcacaggcaggagccatcatgtcaaatcagagcttatgacttgttatttatttatttttgagacaaggtctttctaacttagcctggctgtcctgaaactctgtatatagaccaggctggcctcaaactgacagagatctacttgcctctgcctcatgagttctgggattagagcctggataaaggttattcttaagagcatcttgtttgtaggaaaattaagtagacaatacagagacttctcgtctgttcccattgcaccctctgctttagtgaagtaccattgcacactggcacgtttgctgcagtcagtggacttacctcgtgacaccatcgtcactagaagtccatagttctcactagggttcattcatgaggtcctatatcctatggatttggacagatgtaacttacatgacacgtatgtaccattagagtaccaccaagagccacttctttgccctgaaactcgatgcttagcctggccatccctccccactttagtttttggttgtttgtttgtttgctttgttttggtgtgtgacaccatacctgggctcagtctcacatatggtgccaagattgaacctatgaacttacttgtgctaggcaagcactgtaccaactgagctttctactttctactttttttaaaaaaaaaataaaccactttgtttctacctgcctttatttatttatttatttatttatctatctatttatttattttgttttttcgagacagggtttctctgtgtagctttggagcctatcctggcactcgctctggagaccaggctggcctcaaactcacagagatccacctgcctctgcctccccagtgctgggattaaaggcgtgcgccaccaacacctggcaatttttaaagatgtatttatttttattttatgtgtatgagtgctttacatgtatgtatgtatgtatgtatgtatgtatgtatgtatgtatgtatgtatgtgcaccatgtatgtgcattgctcagggatgccagaagagggcattagatccccctggaactggagttaacagatagttctaagctgcctgtggatgctgggaactgaatctggttcttctgcaagagcgacaagtgttcttaaccactgagctatcattctagcgcctgcaaccacttttaaagaactgaccctgagtttttttaatagggtcagtaaaggactgggcatataatatatctcaatgttttcctaacatgaacaagagctaggttctattatcaatgtggcagcgcgcacacacacaaacacacacacacacacacacacacacacacacacacaccacacacaccacaccacacacacacacacacacacacacacacacaccacacacacacacacacacacacacacacacacacacacaccacacacacacacaccacacacacacacacacacacacacacacaccacacacacacacacacacacacacacacaccacacacacacacacaccacacacacacacacaccacacacacacacaccacacacacacacacacacacacacacacacacacacacacacacacacacacaccacatacacacatttacaatgcccgaagtaaccccttccaagaacccacctcagccagaggggggccctgggccagaccagttgaaaggacaataccagatagccccgctcttcctccccccatccccgccgggagtaggaacacattcagacacttcctctcaatgcctcacccactcccagaatggttctcacggatgaccagcagatgttgtttgagaagctggctttgtactgcgacagctacattcagctcatccctatatcctttgttctgggtgagcgcccccttgcgggttgttcggggtccagtggtcgccccgtagttccagacacacaatgggcggacctccatcagaggcggggagtggggtaaggagggccagtggtcttctaaaaatgttgaggctgggcccatatgtatcaggaagacgtagaaaccgcggcttcacccggcgctggtctctggccacagcccggctcctcgcccctcgcccctcgtccctcatccctcctgcccaggtttctatgtgacgttggtggtgacccgctggtggaaccagtacgagagcttgccttggcccgaccgcctcatgacccaggtgtcaggcttcgtggagggcaaggacgagcaaggtcggcggctgcggcgcacactcatgcgttacgcaatcctgggacaagtgctcatcatgcgcagcatcagcactgcggtctacaagcgctttcccagtcttcaacacctggtgcaagcaggtaggcaacacctggagtgggcggggccgcagggaccgagctgaccggaggcgtggcctgagacttggagtggcaggagctgacgctgggtggagccagagtcccctgatcttgaagagggtgagatggggcaggactaatggagtcagagttggggcagaattggatgggccagaatcagtgctaaaagaggggcgaggccagagtaaactaaaaaggtagggatttgagaaaggtcaagaacccttccgggataaaggaagaagtgggggcgtagggaccgatggaattgggatcaacctcctttctttctgcctgtcctgatctccggtttccagactggatggcttgacatgggtctctagctcttccttgacttttctggggcctgactttagctaataacaaaaccctctacctcccacctcctgtcccatgtgttccagagcagtgcctacctggggctcagtaattttgtgtattaaaacaaacacgataaaaaagcgagcacagaagtccctaggggctcagacaggctgactgggtttcctggcgcaggctgcttcttttgcagggttacctgttgccttgtccactctgccctgcaggctttatgacccctgaggagtataagcgcttgcagaagttgggcctaccacacaacacattctgggtgccctgggtgtggtttgtcaacctgtcaatgaaggcctatgttggaggtcgaatccgggacactgtcctgctcaacagcctgataaacgtgagcccatggatgggatacagtgggaagggttgtggcttcctttaaagagaaggctggaggctcttcccagtgtatgatatttgcgaacaagatttcacagcccaaggtggcccctctccaaatattccctctgtcccctctctgagtgagcctgtgaaatcctggctgctttttgatagatgaagctactgagacacagaggggtctagtgagctgcctatgaccacacagccaaggctattccacgaacatgcattgcacctgggggaaagcagtgggaggtgaccagcaccttctccttttcccccatcctccaggagatgtgcaccatgcgtactcagtgtggacatctgttttcctacgactggatcagcatcccactggtgtacacacaggtaaggacgacactggtgaggctgtctctgagggaaatcggtggctaggaggatccagaaagcacacttccctggagatctcggcctgggagttgggcctggacttggaagattcttcctagtcgtgaggtcaaagcatctgtactcctacctgtccagcccaggagaggaagtgcaaccatcctggtcttaaagaggaacatttggagaggatagagctcattgggtaattcatgcttgccacatgcatgaatccctgggtttgatcttcgggtttgcatgaaactggcatgcacctgtatttccagcactagggatctggtggccagaggatcagaggtgcaactacatagtgagtttcatgccaacctgggctacatgagaccctgtctcagaaataaaaggaaacaaaacacacacacacacacacacacacacacacacacacacacacacaaagaagtgcaaatagaaacccagtcacttgagtgtggaggtcagagcaaggctctagactcaaagcctaagactaaattccagggtctctgcttagccctttgctgccacctgtgccttttcttctcccaggtggtgacagtggcagtatacagctttttcctcgcatgcttggtggggcggcagtttttgaacccagccaagaattacccaggccatgagatggacctcgtcgtacctgtcttcacgatcctgcaattcttgttttacatgggctggctgaaggtaggcctcactgaataccactctcccccacgctataggcatggccagaagggttatggccagcagcacctgtgaggaagacaaagcagctaaaaaaggccatgcatatcatacatgcacacacacacacacacacacacacacacacacacacacacacacacagattctagtctcaatatactttctcccagttatctttgttttctaaagactcaactagattatactacttttatgcttaaaatgatctgagatgcctcactaactatcaggatatcctctggacccacaaaatagtcattacccctgtggagctttgctttaggattttagatattagtgtccaggaaacctccccttctggccactatagctcagcagccttgacatttatttctaatactataaaacagcaaatgtatgcctatcggaaaataaataagtgtacaaaaaaaatcaatgcaacttgaagtgagttagttacatggttggaatcaagatggtcatttggctgagtgacataggtgggacagctgggatcttcagggatggggtggctcatgagggtgagaggggcagaagagagagaccgagaatgtggatggcccatgggaagggtcctggggcccaatacagtggccttgaagacagttgttaggaagagtgtcacgagggagtagaaatggcaggaccaaggcttagagtgggaaccagaatgtcaaggttctcagagcctcacccctgcaccacccccatccccaaggtggcagagcagctcatcaacccctttggtgaggatgatgatgattttgagaccaactggatcattgacagaaacctgcaggtatggggggtggaaggaagtctgtgtcatggacccttctcaaactggatccaaagaggggacccagcagtttttcagggagaccccacagtaaattgtccccttctcaatcaccagccctttcctcagtcaatcatttactcccaggattcacacctcaacttcggaggctacaaataagcatcagtctcttcagtacctcaggtggggaaactgaggcccagagagagcaaactgacatttcctaaggtgtcaggcaagctcatgtacctgtctgggctgcccattctattggatacccctctctgtccttgacaaccaggtatccctgttgtctgtggatgagatgcaccaggatttgcctcccctggagcgtgacatatactggaatgagatagagccgcatccgccctacacagttgcttcggtccaatctcgccgaccttccttcttgggctccaccttcaacatcaggtaggcagtgccagagaactgggtgagaatgctcaagtgtaagggttccctgcagcctggatgtgtggacgatgctctctctctctctctctctctctctctctctctctctctctctctctaagacaggcttttctgtgtagccatggctatcctggaacttattctgtagaccaggctggccatgaactcaaagagaaccacctgcctctgcctcctaaatgctgggattaaaggcatggggcaccactgtgggcttggactatgctctttacagacattactttttttcctcccattaatctttgcttgttatctctacttttcagacaattaagcacaggtacaaaaaagataataaagttgcccatcccaaagttacatacatgacaaagaacacctctgagctagctgtctggttccagctccacattctttttgttttcgattggtttttcatgctgcccaggctggcttcagactcactgtgttttgggggattacagacaagtaccactaccttggcttttggtgttttgttttgtttaagacagtatcttactaagaatctctgactagcccaggctggctttgaattcacaattctcctgactcagcctctcccgagctaggactataggtaagaaccattacactctgctctacctttattcttgttaatttttcttgagacaggatatctctctctctctctctctctctctctctctctctctctctctctctctctctccatagctctggctgtcttggagctcactatgtagacaagttagcctagaactcacagagagccctctgcctctgcctcccaagttctggaactaaagatgtgctatgttccaccacacccggctacctccacactcctaaccctccacagcgttgtgttagccccgccagtccagtctccccttccttgtgtctgggcccaaggagaaacaggacttttccaagggcaggcaatgatcgatgcagtgagatgctgagactggctgtataactctaaccagaaaaattagcctttgggtggacatggaagtgtgggcagcctggggtagaggagggacagtaagggagtccctgtaggacacagggtctcctgaataaactgtcctacagagaaagggcctccttctgcccatggcggccacactttcctctgtacaatcccatttcatttgaattcctcatagatacagggggtgaaatgggacatcccacacagtcctctggatgacagctttgaaggctctcgagaatctgacatatttgcacactgtaccatgctgttctttctttgttcttttacgacccaaagagtccactgaactgaaattaaacttaactagcaacattttggaagatgtttttgaacctgtttcatctgaacaccagcattgaacctggggtggtgtgctggagggtaaggatagcaatacatagcccccccatccagggaatgtgccggctaatgagctaagcaagctccagcccatggccaatgaatggacaggacacagaacagaggtgaccgctttctggcctgcatgcaggtcttagagccagggagattttggatgtgggcaaaggagccaccctgcgatacgcattttcttataggttaaaggtcctggagcctcaggaagtctgctgccaggaagccagacaccttttggtagatgttgctccccactgggaaacaaattcaagttttgcctagacactgctgggctttatctgagctgggtttaccaggagcagaggttcccattgcctggagatgcttaacagggtggagcctgtgggattcagggaattactgttgataaaagaaggaagtttgatctccagaacaaacttaatagacatggtggtatgtacttgtaatcccagtgcagcagcagagacagagacaccactggagactagcctaattggtgaacttcaggctaatgggagaccctatcccaaagaaggtggatggctctcctgaagatgcaatggagtttgtcccctgtccttcacacaggcatacacaggtgcacccactcacacttggacacacacacacacacacacaccaaatctgtaatgctaggctgaggaattggatattgccaatgagcaagagggagcctaaagtgaactgggccttgagggactcccagagaaatgcaggatccaccaagaggtgacagctgaggcactgggaaagccgtgcagcttcggtcctgggtaggcacttgctctacccactcagtcctgtgttcccttccagcctgcagaaagaagacatggagtttcaaccaaatgaggaggatgaggatgacaaggagaacattcacggcggcatcattggacgcttcttagggctgcagtccaatgaccaccatcctcccaggacagactcaaagaccagactattgtggtccaagaaggatcactacctcgagggccagaataagaatgccaagcagacctctaaggaccaggaagataatgcctggaaacttaaaggtttggacaccttcagggctgctccacagtttgagaggtcaggctaccacagtgccccacagacatccatcaaccacatggccttccctcctgagcagtcagcacactccaagcctcacttagtcacaggtatggacactaaagacaaaatcttaacccccatcacttctgagataaagaacactttgttttaaaggtttatttttgccaggcattggtggcacacacctttaatcccagcactcaggaggcagaggcaagtggatctctgtgagttcgaggccagcctggtctccagagcgagtgccaggatagactccaaagctacacagagaaaccctgtctcgaaaacaaaacaaaaggtttatttttatgtatgttatgtgtgtctttgtgagtatatgccacatgtgtgctggtaaccctcagaggtcaggtgtttgatctcctggagctggagttctaggcagctgtgagctgctggatatgggtgctgggaaccaaacttgggtcctctggagcaggaagtgctcgagtgctgaacaatctctccagatccaccaagaacagttgaaattgctcctaggtgatacgggttccccagaacaccaggaaaccatgcacatgaagaggaaaactgtggagtttaacttgaacattccagagagccctgcagcacatcctagaaaaacccatttggaacagcagccggccagcatacacactatactgaaggatcatgtagagctccatgctactccggaaaacaggtctgtccactgatccaggagctgtattccccctgcctgtaaccctagtttcccaacattcccttactgctgataggtaggggaacctatgtccttacactagttgggtgttaacagccactttggcaagaaccatgtaatgggagacctttgacccacttaagagcctggcgttaccaggaacacttgcagaaagtgagactccactaacaatgctgaatgaagggagagctatcgtggggaaggggcagtgggccaaggctgtttttactttttgcccggagagaactaagactgtaggctaggctgcagctaaaagaccagctgggtgcctgtcagttacatggcaaacaaacacttgctcatagcccatactcaaagcactcctacttcccaggaattggccatgagatctcttgggacattttctcagggctttggggcctcatttaatacttccaaaacagccttaaagctgccatgagcctacctgttatttctctaattctcttggacacttttgcccaaatagaaacattccaccccactgctctcatgggcggtcctacttcccacttccccattcttgggtttcatctatgatgagaacatccactgttttgtaaatgaaaaccaaaaaaggcaacaatttctatcttgcttctagggctagacattaacttttatagatcacccaggtgtgtttaagaccagcttcaacctttttttgtcctcataaaatcttaaattaagcaccttcctaactcatgttggggacttttctcaaatcttccacaggtatgaagatggcacctaacctgtttcctaagagtgatgcttcacggcctggtcctcacctgcacggatgtcagcaggacactgacccagtctgaggcataccgctgttaacaccctgagtatgttcctgtgacagtcttggcaagtaattcagaaccaggagtgcttagtcctgtccgaacacacctgtatcttactgtctttcccaaattaaggagttgaataaatacaagtattcttttaggtatctcagtgtcattagtgtaacagggacacactggaagctgacaccttcaatctcaaagacaacagttgggtaccaaaatcctttatttgaagaaatggtacaaattaaaagaacttaagcagatgttttggtgacttatagaaaaggtaacggcagccaacatgcatacactgcctcagtgactgatgacatcactggtggcttcgggaagtcagcttagctctcactatgtcccagggtgtgcttgtcaaagagatattctgccatgccagcttcaggggctcccatcttgcgcaagttggtcacgtggtcacccagctctttgatggatttcacctgctcattcaggtaatgggtctcaatgaagtcacacaactaggaaagagaatatgagacaaagttattggtcagctctcccaagccccttggggcaaatggttacctccattcattcccattttcaatactcacatgggggtcatttttgtcagtagccagtttgtgcagttccagtagtgactgattcacactcttttccaagtgcagtgcacactccattgcgttcagcccactctcccagtcatcacggtctggtttctgaaaagaacattcgaggtcagttcatctgcagtctctaccaatcactccctcagtaaatacctcacacctatccaccatactttttgccttgtttcctctgacaagtttctccgttaacatgcttgctcactgccgtttgcaaactttggtatcagtataggtctaaaaaggtacaagggcaaaggcccagtgtggcatcattttctaaggaatcgttaattgctcatttgaaaggcacccctagatctacttaccttgatatcctgcaggaagattcggccacctcgttggttctgcagcttcatcagtttctcagcgtgttccctctcctcatgagattggtggagaaagtatttggcaaagttcttcagagccacatcatcccggtcaaagtagcaagactgaaagtggaaagggtacacgtcatggttcccacagcaaggcagctggaatgactgtaggtggtaggctgtttgctaccccacttggcctttttaaaggagtggagaactatcctatatggctctgtattagggcagagaaaaaactttaagccaaggccaaatcttgtctgagaaggtaccctgaggggtgcaccccctcaaccagtcatgtgaaaaacagttaataaatacactcacaagcttcccatatgggcagctgactgattagtaaaatcgatgcctcatgcctggtgacaacttagggcactatacttttaacacaaacatattgggagatttggtttttagtttcaggcactcagtgtatttggatggtccagagaaaaatgacagccacaggcacccaggcctgtttcaaacctatttggaaaacatttttggataactagcacaaccacaaggcaatctctcattacattgctccaaacctgtttttcagaaacagattagtgcacaggaaacctccttgcccagcaactgatggtgggatttatcaaacaactacctaccaattctgttaagccacaacttctttgggggaggaggttcgagacagggtttctctgtgactttggaggctgtcctggaactagctcttgtagaccaggctggtctcgaactcacagagatccgcctgcctctgcatcccgagtgctgggattaaaggcgtgcgccgccgccgccgccgccaccaccacccagccaagccacaactcttaagacgcaaaaactgatacaacactctggatgacttgtagggacaaggtcgggtgacactgatcactgccgaaggggagattcccagagataatgctgcagtacaagtgaggctctgtgataagcagagcagagaggtggagtcggctgcttaaggggtcagggtcagctcacaagagataagcctctgcaccaggccccaacgctgccattcgataccatgaccaagcaggcccgccatactcagaggaattggagctgcatgcatactgaagcagagaagcctgcaggtcacgtggtcggagagagaagaaaaaaaaatgcacctaactgcgtgtttgactggacgggctgacagtcgcgcagccttaagacctagtctatgcaagagtcaccaggggctaaaagctcagacttgccacgccagggctgccccgggagagagccggagcaaactccattttccagaagggcgctgggaggcctgcagctggccacgccccaacccgtgccccgcctgctcccccagtggccccgagggaggaggcagcgcccgactcccgcccgccagaggccaggccgcgctcgctcaccatagacagatagacgtaggaggcgtacagttccaggttgatctggcggttgatggcagcctccgagtcctggtggtagttctggcgcacctgcgagggagacgcggtggtcagggcggtggtggtcatggcggcggcgggcgcggtggcgacgctggagcggcggagcgacgaggttgcaaagggttctgtcccggagcggccggctggggtcggaggggtcgagcgccgggttccgttcaagcactgttgaagcaggaaaccgcggcgactctgggcgagaacgtctggcgcaggaggccagcgggcagcactttatagcgggagttcgcgtcaggcgcgctcggaccaatcagcgccgggacccgcctcttccggtgagcgtgcggcccagacccgcagggcgcgggcggggacgatcctgtgagtgtgaggctgcgcgagaggccttgatcctttctgccagatcagtgcctgtcagcaagcgcgctgttcctgtgccccggggcgggaggtagttaactccagccctactgaagtgcggtctgggttcttgggacccattggggacagagggtgcggctgagggtgattttcaagtccccaaactctgtacgtgtggttaaatcgtgacacgccaggcagtgacttcgtcttacagataggaaaatggaagcgtggtgctgtaggtggcggaccagttataaattgggctggggaagagcggctttctctccttcagagtctatggagagacgcgtaaaggaggagtagggggggcggctgttggggaggagggggttcgggtctgccccgtcattctgactcaggcaaccctggccttttgctgataacaaacatgactccgtggacatttgaaaaaacaaaggctgagagggcgtttctcccgagagcagggacagacagccttctatgggggaatcctggggccgaaccatctaggtttctgaaaaagtccctggtgatacttaaaatgaagagaggtctctggattagaaaagaaagtaaaagcgacccacgtgtatctatttcaaaatggtctccttttatctttctcggtaaccttgggtttgcctttggagaaaagctgatggggctgaatggcaggtgacaggtgcaggaaaccttagggttagaagccaactgtgtgtgtgtctggtagctgtgacccagctttaaaatgtatgtgaattcttagtcgaactataggttagccactgcatctagctaggccctgccatctatgtctgcgactctcagtctagtcttttgacacaagtgggagccccagcagaagcctttccagatgctaaaagctggaagctggactttcaaacattttgttaccgtttagagacagtgttgccaaggttactgtacagctcagactggcctagaactcaccatgtaacccaagttggttcctgattctccagctacagtttccagagagctgggattacatcccacctctctccccttttaaagtaagtctactgaaatactagtggtatttattcttttaaaaacagccgggcgttggtggcgcacgcctttaatcaaagcacttgggaggcagaggcaggcggctctctgtgagttcgaggccagcctggtttccagagcaagtgccaggataggctccaaagcaatacagagaaaccctgtctcgaaaaaccaaaaacaaaaaagaaaaagtggaggattgagagagggaaagggattctcagagtcagtagaggggctaacatggaaatgcttgacctgttccaggaaccttaaggaaagtgtgtttgttggcctagaaaacaaagtacatgttgggaagtgctggaaaaaaaacacagtcagaataatgtgccataaaaagtcattaaactttaccctgcaaacaatatgaagatatcatatccatttgtttttagccaccatcaggaaatgtgatgaaagattggggggtaatatcaaatattttcacttaatcagcagcatatactccaagtaccaagtaataagattaacgatagcattaatgagacaaataaccacaaacaaagcagttactgactgtgatgaggaggtggaaggaagggtcaaccttcatattaccatgtcagctctaaacctgtaattcttttttttttggtttttcaagacagggtttctctgtgtagctttggagcctatcctggcactcgttctggaggccaggctggcctcaaactcacagagatccgcctgtctctgcctcccaagtgctgggattaaaggcgtgagccaccaacgcccagctctaaacctgtaattcaacacaatctgaaatgtgaaaaatacagtttttccttgatgtagggtgtgattctgaagttcatatgaagtcagtggactcactggtaacatttgagaagaacaaaggctataagggaagttttgcttgagataactattttatacactcacatacacacatttgtatatattacaataaattacggtactgacacaggaagttgagatcaacatcaaaatagtcccacccacatatgtatgggaacttaatataagttaaaggcatgcctttcaaattagggaagaaggggtttaaccaaataatgtcgacacaattgtcatgtggaaaaaatgaatcattctgtatttaaaaataccttccagatgaattaaaaatacaacccttaaagttaaaatctataaagttttaagaaaactgttaagaagattatccagatttggagtagggaatgttcttttgagtctgtcaaaagttggcaggctttactgcttaaaaatgaaaagggtagataaagatattttaaacgagattaacatagaaatggtgtgttaggctgggcgtatttgttgtccatagaaatggtgaagatctgctgtgtggtggtggctcatgcctttaatcccagcacttgggatgcagaggcaggtggagctctgagaattcaaggccagcctcgtcaacaaaatgaattccaggacagctagagctgttacacagagaaccctgtcccaaaaaaaaaaaccaaaaggaaggcatgaagatcaagagccagaatatatatgtagaatagtataataaatgcttttttcagtcttggggatggaacctaggacctgggcagactacagaagtgctcctgctgtagtccagttctttcttttttatttaaaaatagcctcactgtattgtctagactaatcttgaagcctaggctcaagagatcctttttaatttagcctctctattgtccagactccattgtatcactgcaccagggtaagtgatgtctgaagtaatcattcttttttatagggaccatttggttgacttccctactcctgtagattgaaagctcaggtaggaaggcatttctagcacatgatgtcctttgtcaaggtgcttgtgatttggtgcttgaacaaatgaatgtgttttgtgtggagtttggattccagtcaagcaagagggttgggtaccagttgggagacagctgtcgtggttttttaatgagcgtaggagacagaaagcagaagagagattatggagaagacaggttgaggtgaatggttgaatagtgtgtgggttgggaggtggggagtgggtatgaggctcccccaggtttcaggcctgggcagctggattgctgtggcccagcgtggtgccagagaaatgcagttgaagcacaagtttggggaaaaccttttggaaaggtcagcttcttttgggactggctgtgtggctctccaagactcccaggtaaacagaaacagtacagttagactcactgaaaagaagtttgggctgccactttttgtgaatgagtactggcttcagcttgttaatacatccctagttacagtaaacagcacagcaaaccatggacggtgtgttctgtggagggtctctaagggaggagggcttgaagggaaatgggaagtatgtgagcacctttgcttatgtgggggtcccacattttgggagcagtgggtgccagcgctgccatctccaagcctccagattctgaagaaggggcgggtctgtggacctttgttgtccaggcttctgcctccccaacccccatgttgcctctattcctcgtgactttgaggagggagttggctagctgcccagaataagatgaacagtggcctcccagagccaggagccacagagcaaatgcaggccatgagagagacaggcccctctgttctgtagaatactagttcagtccagaggaggaggtgggggtggagaaatcttgtggtggagggctgttgttccacagtgactcagcactctgtttctctagagggcttgggctccaaaagtgctttgtcatggaggggcagggcagtctggaaggctgtggttttgctgtgggagagagggagaagaggggaggagaagagggaaggaacacatgagagctccccattgccccatgggatacagaagctggactgagaataaagaagtcttgatcaccctgccagacttgggtgatatttttgccagaaaggcaaaatgcctttctgtctcttgtggggacttctcagcagatagtgggtgggactctttcccctctagtgattgtccctctgcagttacagctgttgaggatgtcacatccagaagtcttagacatttggtacattagggtcgaaaggctactagagtatacagatcactttacttcataggacaaaaggtgagacccaaagaaagtgaggcttcctcaggaaaatagccaataaaatatggagcagagtaagcgatggaacaccagggcaatcattaaacatcatatgatcataaatgtctgatgagtgtgttgccagagtgtgcatatggaaaaaagttcctgcaagccagttactggtaagggactctcagggatggacacaggtgaaggctgggtgaaaatgagctgaacaaccaatgttgcaaaagtatgggattccctgagagttgtatgggaaataccgagacttggaaagcaccactcagccagattctggtacattctagatgaagcaactgtcattcagagagcttgtccttaaatcatttcttgaaaattcatgaggccctgtagactgaaaagtctagatacccagaatccttctcttctagaatgttaaaggttgagattcacagcctggaatgttagaagacaactgtgaatggaagccctggctcccctttaggaaaaaaaaaaaaaaaaaaaaaaaaggattcagggctggagagagataattggcttgagtttgatcttcattctacatggtaaaaggaatgaacctattcttgcaaattttacatccttcctagtaagtataaaattttaaaaatagtgtagggaaggagtggaaatgtacatatagtacttacaaatgaaattctaaaaaaaaaattaaattttttaaaaaagtattcaggccttcctctggaaccttcccaggctgcgtctgggggaaccaccatggtctgccagagaccatatcacttggactctggctgtttgtctgattggtcaccttccctccggactttgtccccacactatagcaccgccagaggcccttctgcctccccaacccccatgttgcctctattcctcgtgactttgaggagggagttggctagctgctgtgctgtccactttgttaactttcctctactcctcctaccctatgggatatatggttcctactttggcctgagggcccttggtggccaggctctactctgtccttcctagtgacccctgtgggtatccacctacaacccagaagcctccaggaggccatttgtcctctctcagctctgttcctgcattgaggtatggcatgtaaaacccagtctcccccatacttctcccttcacatctttcctcatgaaaccaaatgagagtggcaactggtcatgcagatttaggtcacctaaacatgacattccagcgtggtggcggttttgtgaagtttccataataacagaacaaatgaaagtcatatcagacctttccagtatattcatgggtataacagataggcgagttacagggggggaaaaaaaagaaaggcctcagatgctatctgatgacattcttcgattttgagttgggggaagctacagggtctgtttatatggtccaaggatttacctaacagtaacaaggttgttaggccacatacaaaggtgtacaatcatggccgtttaagagggctaaagatagctcaagataatttgcagggaggctccatacttgttacattccagtctttccagaaacactgaagttctaggccttaacaaacgcagcttctttatggatgcctttgttcacagttccctctgtgccacagttcttgtcacaggccatcagctgttacccagccgcatgctgtgcctactttacctcatctaggctcagctgggcctaccctggccaaatcagggagacccggaccagcagaagtgacagccagcagcttcagtggtgagaagagaagaaacatgacttctaagccatggcagagacatcagccttctgggcctagggacacctccttgaggaaatgggagtgctggatgccaaatagatgcttactcattcaaagaagggtatgcaaatctactgttagccatcaactcccaaatagtgacatggaggcattattaattatgaaagcttgtcttttagcttaggcttgttcccaattagctcttataacttaaattaacctctttttattaatctacatattgccgcatggcttttacctctctcctattctgtacatccgacttgctccatgtctctctgtcatctctcctcctctcttcttaccagagtccctctctgtctctctggaagtcccgcctattctctcctgaattgttgttggctattcagctttttattaaaccaatcacaatgacacatcttcacacagtgtaaacaaataccctgcaacgggtcaaggttgaggagttgatggaggagaactgagttagtagtctggctacagagcctagggttgggagttctagatttgcttgcagtggaaagaggaatggacacagaaaggagtctggttagtggcctgggacacagggtggatacaaaggacaaacctaggactgaccaagtgggaagtaaacagaaggtttcacaggataatagctaggtgatttttcctcgctgatgaacgtccctttggccagcagatggtcagtagacaggaatatgagtgtcccatgacagaatcaggatcccaaaggcttcactagatgcacataatgggtctcagtcatcatgaagccactaacagtgttccaggatccttctattctgctcatcccagtggtagaaaagcaaaggcaagcatttcctttctcagattaaaacccctgcagggctcacccctgccccagaaatacattgtaaccccttcctctctgtgggactgaggcaagtagatccaggcaagtggatcccatctttctgttgctcaccccttaggccttttcccttcaaagatcccctcacacctcatttgctcagcgtagactgcctgcctctggcttttacttcagaaaaatgacctggcttttgacaacccccagctcacatatcctgtgtagcttccctccttgcccaggggagaatttctatcccttctgctccctagtgcctccaatactgtgccttgttagaatagcctgccatttgccagccctcgccactggaagaaggcctggcctcttcatcatggcagtgcttttcctgcccttaactcagaacccagcagaatagcaccctcgggttactgagaaatacaggttgccttgactttggccttagctcactgtttactttgttgttattgggagctcagtcaccccaccccttgcctcagaggttgggttttcccatcttcacctaattaagaccagctctttctgctcccacatgggagatacagagaataggccagtctttctggggttgaggatttatgccctggcacagaccccaggacataaggcagggcacccaggaccaacagggctatgaggatagtgggatgacacatggtcacgggttccattgctctgagggccaagtaagttcctttgctgccccatggatgcaaaatgcttcctcaactagagggaatctggggtgtcacagaggccaggggaggaagtaaaggattgctgtagcaagttcactactagaaaataccacatgcttcctggtgatgaactagaacattcttgaggtccttgtcaccccatgagtgtggtactggccacagtgccagagagcttacataaagccgttgataccttatgactgaaactgacaacacccctgctgagaaggctggcaggccccagtgctgtagacagagtcctctcctcagatgaggaagctgaggtcagagaggtgaagtgactgactgcctggcctaaggttgtgcagcttgcaggagacagggccctgcctggaacccaggtcctcactgtggggaagtgttctagtggggcacatcaatgcagccatggtggcaacatcctgaaactagtggccttgtccaaaggtgtgcaagaagatcccccagattctgattgtctggagacctctgaaatgtcattgtctcttggtatcctccagaactgggatttaagctgaggttgtgagttctaggacccagtacataacaaaccacaaatgttcagttctttttcccccttcctgacagggtttcaagtatcccacactggcctttctgtgtagccaggaatgatctgaacttctgcccctctgtgtttacctcttgaatgctaacattattaggcatgtgccaccaaaagtggttttattcgatactagagttagaaccctggatttttatgaatgtaagacaagctctctaccaactgagtaccacccagcctcgattctaatacattaactagcatagtatctgcacagagtctaggtgctcttcccatatattctctgtatgtgtgtgtttgtgtatgtgtgcacatgtttatagaagcatgagtgcacatgtgtgcatgcatgtggaaggtcaccttcattgggtacctctatcatgctccaccttatattttgagaaaggatctctctgaacctagagttcaccagtgagctccagggatctgccctctgcccctgcagcactggggttgtagacgtgcaccataaagcctggagtttcacatggccactggggatgcaacccatgtcttcatacttgcttggcagacaaatttatccattgggccatctcttcatcccacctctttttagaatgtttagttaaaatataatgacatcatttgccccctcctccctacaacccctttcctgccccccatctctgtctgaggggatccctgcaggtgtcatacagggaagtgaaccattcgaagagatgagaatgaaaaccctgtgcagattgacttcatcaacctggatcagacttggaggagtctcgtacagggcagttcatgtttaaaacacagcacgaagtgggaaaaggtttccaggcaacaatcagtccaattccagatgtacaataaagcttaaggtgtgactacctaaagactcttttgcaaagtacatgtgaccatgagggtgggttccatagctaaagggacctatagcatagaggtcatcaggccataaagcacatgtgacatctatgctaaggtaatggtctagggagggaagagtctgagatagtcattctggggaattagggtgacgtctgtctctacagagagcaaaaaggtcactaggtccttaacaaactccactctcagctttctggatggaacacaggcatttgattttagctcctccatggaggagccacccttgttgattctattcctggttctctttgtgcttctctgtgagtacaaggacctctgtgcccccaacacctctcgactttatggctctttttctctaattattactcagtaataatcattgttacatatgcataaactgctgagtccctttagtgtgtgttgcttgtgtgtatgtttttaggattgaccagttggtgttggatagccatttagggactcacccctaagggaagatgaattctttttctctcagctttggccattctctcttaattgccccatgtggctcttcatatagaggtggagcctcatgagatttctcccatcaatgttggcatgtcaactggtgtcattgatcaggtttgcttaggcagccatgttgttgagatttcatgggtgtagcctccctgtcataaagacacaatgcagtagcttctctgggcctctggcaattgtagtcttcctgtttcctctttggtgatgttctcagtgccttaggttgtgttatagaagaatcaattgtactgtgcaccctctctctcttttaagacagttggcctggaatttactgtttctcaggctagcttcaaatttagggtaatctttatgcctctgagttctgggattacaaaggtatgggccactacacaggcctctgtcacagactttaaatcatgtctagtttgcttataataatgaataccgtataagagctggggaaatagctgccaatctatattgattagggaactatgacaaggggacagtttgattttcttgttttttgttgttgttgttgttgttgtttgttttgttttgtgtgtgtgtatgtttgtttgtttgttttttgttttgttttccgagacagggtttctctgtgtagctttggagcctatcctggcactcactctggagaccaggctgccctcgaactcacagagatccgcctacctctgcctcccgagtgctgggattaaaggagtgcgccaccaacgcccagtgacagtttggttttctagaaggctagcatggaggatctgtatttgtaccataggtgaacaacagatcctgtagtctgatccccaggcagtggtgagtcagggccttctagaccagcttccggacttggagtcagagctgctacttccgagttcattcactgtgaccctgccaatagcaaagccattgggtttgctataaggggttatcttccaaattaattagtgatttgatcctaactgaagtttgctcattggtagagttttgtgattcactacccatccaccctgtttcagttttgttgttctttagaagccaccatgaagagtctcatgacgaggctcaggcaatgaacatggttttgagcttagtctgtagttggcaggattggttagtaacctgaggacctaagatggcttgctgttcagtggtatccctgagcagttcatcagaaggggacatacagggaatattgtcattagggaccaagaccggctcttcagccctccagggcactctgcaggcttgactctttcccccagaggctgggggccttttgtcagtcaaagcagagcaatcccttatctgggagctataaagtctccctgaggagctcatggcttctcattcctgtacaaatctgtcagcgtctgccgtctgagaaacggaagtacatcatacatgagagagttcagggtgatctgtcatgaaatccagcttccaggtaggtccctggacctatcccctgcttcctctgtagagaactctattgtttgaggcttgtgacttcagtgagacccaggagaagcttccttagggactggcatctttcatggtctcccctttgccatctgactggttttccaggtatgaatgacattctaactccctttgaacatcccgccttgattcaattccctggaattgtaattaattggaacttagtagctctagtcctccccagacatacacgctccctcacctgtccacctgattttccagtgtcatgtgtgggaacgtgattgtacaggtgagtggcagaatctagtttgttttttttttttttcctttcttctgggatttctaatttctccagaccctcatatacttacctacctcaacacctacctctctttctagagtctacagctagatttttctctggtgaattgtttctcccttctgcctctgctatgtactagaattagaactgcccacccccaccccacccttagaggtacttatgctttctgttacttgggataaaaatttcaataaaattatttttgttgttggccaggcacatgcctttactcccatggattggggggcagaggcaggcagatctctgtgagttcaaggccaatctggtctacaaagctacacagagaaatccttcctcaaaaaaaccataaaaaaaaaaatactttcgttgttgaagttttttttctttttttcgagacagggtttctctgtggctttggagcctgtcctgaaactagctcttgtagaccaggctgctcttgaattcacagagatccaaccacctctgcctcccaagtgctgggattaaaggcatgcgccatcaccacttggctgtttgtagtttcttttgagttagagtctcacatacccccagggtggccttgaacttactgtatggctgaccttgaacttctcatccttctgcctctaccttggcttatatgtgggagccgccacacccagcttcagtcagcctaccatttaaatcacctacatggcagctgactccttcttagtcaaacctggaaggagccttgagagcaagttaagacttattctgtccttcagctggcattttgttcattcatttttggagacagggtctcatgtatcccatgttagcgttgagcctgttaggaaacttaggatgaacttgagcacatgaaaccatgctcagtgtgtgtggtgcttgtaatccagttgggctttgtgtttgctgagcaagtactctactgactaagctacattccccgcctctcagctaagaattgtttaaatgttaatttttttttttttttttttttggttttttgagacagggtttctctgtgtagctttggagcctgtcctggcactcactctggagaccaggctggcctcgaactcacagagatcctcctgcttctgcctcccgagtgctgggattaaaggcgtgtgccaccaacacccgggggttaaaaatattttcgaagtgtgtgtgtgtgtgttatggggggggtctgggtctgggtctgggtaggtgcctttggagcccagaagaggtattggatcatctggagcttgagttataggtaattgtgctgcaactaaccttctaaaatgacattttgtgcctgacctgatgacacagacctgtatccttagctacttgtgaggctgaggcaggaaaatcaaaagttcaagaccttctatggctacagagtgagttcagatctagcctgggaaacttaagagagaccctgtttcaaatcagcaacaaaacattttttaaaaaaaggaggctgtagtctgtgttggcgagtgtgcctagaatgtgattaaccctgagttcagcccttagcgctggacagaagagaagagttaggtgaagctgaaaacaatactcatgcttccaatacctgagccagctgctttttgttgcatttcctcaaagcctgtcaggatgttcatacacggttccaaaagcatgaaaaatccgggggataatgttccagtctttagtttcctgagctggagggccgaggggtgcaaagggaaggagagaagatgagaaaggtgaggacaagaaacaagaatccggtaaatggcctagttcacagaacacttatcggcatacataatgacaggcactgcgatcctttttggtcaatgaaggatcactcatatgacagtggtcttgcattcctgtagcctggtgacgtttacttacttacgcatgtgtggcaatgcctgtgtaaacagagcaaccgcactgaaatttgcctaaaagtacgacacgaaattatgcagtgtcatacttggtaagaaatgcctctgttcctggtttagcttatttaccacggcatatttcttagcattcttttagtcttttatttctacctgagaaacaaaatgaaaaaccaagttcactgtcaaacaatatgacaggttatttgggcagcagcctcaaccacttcatgtttactgtgtcttgatagcatgaaagagaagggctggaaatgaatgatttagcgagttgttctttaagtgtctggtagtgatctgtgctgagccatcggggaaacagtgacaaacaagccttcagctgccctggggacctcctggccccagctaacacacgatctttgcagatgttttaaaaaaaacaccttgcctgccacacctgcctggtgccagggttgctggggacccaggcatctatctcccgggtgtaacctctgaggccgcaagcagcaattagccaccacaaatggagtctgataaagcaccacctagaagtggtgaaggcaaattccagacacgcagggcatctataaccagtagtcaaactgggagggacaggagatatgggaccaggttatttggggagcttgttgagctgccctgccctgccctgccctgttgccctgtttcttcaagctgccatctccacagctgacctcactcacctctcagacagttgttacttagcagctgcctctgagtctaggcacagatgtctgacgggtggcagggcaggcacatgaggactcataccctggcctcctttcttcaggtctcatgagtcccttaagtcacccacatctgtccctgttgtatcccacaagtccagtgtggccctacctctgctgcttttctttaagtctatcttaaaactgtaccttgttttaaattttaaaaaaaagtgtgtgtgtgtgtgtgtgtgtgtgtgtgtgtgtgtgtgtgtgtgtgtgtacacagtggcagacttggtgatggcagcggcagcagcactgaactcaaagctcacagttttatctagactggccagccaatgagctgctggagtcttcctgtctctgcccttcaaacgctggtgttccaggatcacaaagccatgctcagcttttacaccagtgtcaggtcctcatgcttgcacagcaagtgctactgtccaccaagtcatctctccgtgtccccccaaactgttcctttctatccttcataggcctttcctttctccaaactctgctttaagtgagcagctgcaggccctggaacagaatcttcctttcgggtttcctgctagcattcagtctttgccgagagacagggatgcctgagtctttgcattgtcatccctccactgcacagagacacagaaggctcagaggagaaggcagaataagggcttgacttccctccccctttatcttctaaattagttggttttctagtatctgtgtaacagtcagctgtcattactataatgaagaaactgaggcaattaacttacaaagagaaaaaggctttattgctgatgggactggaaattacgttccaagattgcatgacacctgttttggactctggtgatgatggcacattatggtgggagcacaagaaagtgacctcatgccacgaacaggaagccagtaaggtattaaagtagtctgtgagggcatgctcctaatacccaagaacttaccaggcccacttcaatggccctgctgcttcccgtagagcaccatcctagagaccatgactctagcacacggtggacactcatctaaaccatagcaaccaccaaagtcagttaataaggtgtcttgtttttgaggcagggtctcagactctctgtgtagctgagaatgaccctgtgtttctggttgtcttgcctctacctcctgggtgctgagattgcaggcatgcaccacgttcagttttcagtctaaaaaattattatgaagggcatagagagatagcagaaccattgagaacacttgctgttcttcccaaaaaaactggtgtttggttctcagcacccatgtaggcagctcataactagcctataatgccagtcccagggaatctaatatcatattctgccctctgtcatacagtcacacacatggggtggggatggggcggcagacagacagatttaacagacaaatgttaaaatcattacacagcctggcttttagtatatttcatgtgtttctggagctccaggtattaaatgtgctggttctcagagggtctcaacttgtgtctggtggcagcagttcactttgtgcctgagttcttttgacatgaactctccactagaggtctagaacaagttcattctattctattctattctcatttagaggtaccatgtgcacatgttatttgtgttgctcaaaaacactccgtcttttcagagtgtgcaagtaaagcttttaatatgtaagatggtagccatacaagtgtaaggactgagttcaaattctgagcatccttgtgaatgcagagtgggtggggcagcctgtttataatcccagtatcaggaaggcaaagaggcaggaaattcctgaagcaatctgtctaactagcagaattgacaagttcctggttcagagagagaccctgctgatggggaatgtactcctgtgtatgttcatcttattgattattgaataaagtactgtttggccaatgaggcagcaagttaggcgggactaggagtcaaggaggaaatgtagtaaagaagtggtgatctacacaggaagtgacataggagggagactcataaacaaggcaagaaggaagtgggccccttctctcttcaccatgtaatcccgggatgaggacgccaatggaaggcatcctctataagataagtcttataaaatatgtagatttatgataattacgactgacgtaacagatgagaaatcctagtcaatggccaagcagcatttgtacctaatacaagtctctgtgttttatttggggccctaactcggcggccagaactcaggcagctggcggaaagcgcccacatggtggtagggctcgggtggcttttggcgaaaagatttatcataacatcctgcctcaatctgcaagatggagagtagtaattacataacataaagatacataatgttagcgtggcctccacatgtacccatacatgtgtgcccacacacatgtgaacatgcacatgtaactcctgggcatcacatacacacaaagaattattttatcttaccattatttgttattttgagtcagcatcttgctgtgtagctctggtttgatcactactcactgtgtagcccaggctggcatcaggcttggggcagtctgcctgcttatacacaagacaccatgctcagtattctcttttaatttcaagaagaaataagttcagactcacttcctaaatgtataggtctggggttttacttaaagaggggggcatggatggatggaagtctttgtgctttcaggcatgtgctaggggaacctggaatggtaagcacacaaggttgttccttcatgggaaggaatgaaaaacatgttatcttcccagaggctggagcagccatgaccattgtgctatctgctaaagacttttctggcactagatcctctgcagaccttatcataaatttgtttttttcagttaatctatagaacctatctttatggactttacaaagagttttgacatagtcacatctgaatgcatttagattaatttatttcccaaggagatttacttatgtatgcttggttgtgcacacgggattgagttaattattaccagagtagttttcaccaaattgtactatgcttaaatatgcctaaaacaaacaactcagggtcagattcctgaagtttgaaccaacaccagctactgagtagtgttgagccaagctggctttttgcctcccgttgcctggcttatcactctgttggccatgaaggtcgaagataaccctgcccacacacaggcacttagatatatagatttttgggtctaaatggcttctcctctgccctaactctccattcggagggcggcatcataagtccttatctgcatttttctgtaactcatgttactgaagacagcttaaattactgcactgttctcagagcagacctcactaggagtatgaaacggctgtggtaaagtctcttgggagagttcctctgcatgcatgctgccagctcagcacacagggacattttgctttcaaattttaggaattgattttgtgaagttctcagagaaaaagccagacctgagttaaagaatctgtaaggatgagtggctgacaacatttagactgtggagagttagaatgttgttcatcctggacttgattccctcagggcccatggtagctgttcctgtgtctgacctaagatccttgtgactgtcatgtgaaacatttgtggacatgttaacagactcttggcttctgccaaccgaaacctaagaatgtcattgataatgtctataaaattcgtagcagagttttccttgcttggctataacttacctgatgtgtccagtactgtgtttagaaaataccttgattaggtggacatggtggctcacacctttaatcccagcacttgtgaggcagaggcaggcagatctctgtgaattcaagaccagcctggtctacatgaattctaggacagcaagaattacctagtgagaccctgtcttgggaaaaaccaaaaccaaaacaaaacagatgccttgatttgtaccattctcttttgccatgactttgccattctctttttgctgttttgttattataaaatttcacgtgaccagccatattagatactctgtgaaagttactctgtgaaagctgaatccaggtatcaggtcatggacactctgtggctcagaatagattatctcttcttccttttgaggtggcagttgtgttttgtatcctcagtttgtctttggagatgaactcagggctttgaccatgctaagcacactctaccactgcgctgcacctccaacctgagattgctttcaaattttaatatagggccagcaagatgccccagtgggtgaaggtgcttgctgctaagcctgatgatctgaatttgatccccaggacccgcatggtagcagagaattactcttgagagttgtcctctgacagtcacatgcatgctgtaggacggtgcccgcacacatatacacgtgcaagataaataagcgcaaattttaatttaatgtttttttgtttttgtttttgtttttgtttttgcaagacagggtttctctgtggctttggaggctgacctggaactagctcttgtagaccaggctggtctcaaactcacagagatccacctgcctctgcttcccaagtgctgagattaaaggcgtgcgccaccaacgcccggcaatgttattaattttaaaaagttttattcattttattttatgtgtatgaatgctttgcctgcatggtatttacatggtatgtatgtgtaccatgtaaatacctggtgtccaaggaggacagaagagggcattggatgcgggcggtgggaattgaacccaggtcctctgcaaaggcaacaaatgcttttgccccactgagctatttccccagcccctaatataattttataattatgtaaaacaaatagagtcatgccacatacaaaaataaggtccacttaaaggattctggagtctcttctctctacacgactctacttaaaccacctatgtttatgaggatgtgcatagcgacacttccaaatttgccttttgtcttcttcctttctagacaaacacttgtttctgagtgcatctcccccactttctcagtcatgtttttccctttaacaaggtgccccgaggttcactttgtatttattcgtagaggtcttccttgttccttccatggttcagagcagtttcttgtgtgatgtgctggttatatccactctcttattctggatatttggcttcctcccaggccttgactgtcacagagagcttcagtaaataaccttgtcccaggactttctgtattgtttgccatggatctttaggataggttcctggaagtggggtgtgggtcaaagggcaaactaagcattgccaagttcttttccataggatggcaccacctcccacgagtggtgtgtgaccatgttggctttctcatagtctaaacaagagagcattttgttaaatctttgaattttggcccatctgatcagtgagaaatagttccccagggcaatttacatttcttttactataagcaatgttgagtgtcttctcacacagttcagaggcatttgcctttttctttaactattggtatttttagtgcattttccaaccagtcactgaccttttagactatagtagaagccccttgtatactaatattaatatatatgtatgctgaatgcataaatttttgtctacaatgtaatttgaacttttagtcagttgtgtacttttgctcatttatttatacaaattttaaagatttatttttattttcatgtgtgtatattgtgtgtctgagtgtatgccacatgtgtgtaggtgtccttggcagccagggagggtgtcagattccctggagttggaattatgaatggttgtgagccaccagatgtgggtcctgggaagcaaacttcaaccctctggaggctcaacaagcacccttaaccactgaaccatctgtctatcccctatttatttatttatttgtatttatttttccttgggtttttcgagacagggtttctctgtggctttggaggctatcctggaactagctcttacagaccagactggtctcgaactcacagaaatctgcctgcttctgcctcccgaatgctgggatcaaaggtgtgtgccactaccgcccagcctatcccctatttatataaattttatttaattacttggtttgggccacacagaatccagtgtgtatctttctcctcatggcttctggatgttgtatgagaattgggaaagtctgccctactcctaaattataggagacttcatattactctttatagtattcatagttttacttttgggggaaggttcttatggaccccaggttgccctcctgcaactcactatgtatctgaggatgaccttgaagtcccaatcttcctcctatctccacgctgtgagtgctgggatcacaagtgggtgccacatgcttggtttatgtggtgctggggatccagcccagggcttcctgcatgctggggaagcagtctagcaactgagccatctcttgccctagtttcagtttacatctgaatctcagttccttcaggaggatcttggtcagcagcatgaagaagatgtctaggtatttctgagtccgcatggcctcctcttagcccattgtcacctactgatccccattcttcccttgggatgctgttttcttcatgcctcccttctccactgacagtagggctgctgtcttgagtttaaactcttgtttcccagaggaataaattcctgtccttcacctctgcctaggtcctggtaaggtaagcacagtcaatctaggacagcatagcaccaggcagagcatctgtagagcaggtagagggtgggtctagctttggggcaagggaaggctctacctgtcaacagttctttgtgccaggcatagagatcaagctttggagacaaatagtcttgagaaggagaccttgtttagtgagactgggtctccctgtgtactctgggctggcctggtacttgctgagtagccaaggctggccttgaactcacgtcagtcctcctgacttaacccctcaaatgctgggattcaaagtgtcctctcccaggaaatcttgcttgtccaaatccatactaataccatacttagcacagagaatttctggaaactcaccttcagagtcagggaagaggactgtctgggtagagttgggcaagaacaaacattaaaagttttacaatgactaatggttgcccttgaaggatcatttctccctaagaacatagaaccaacatctatcccgtccatccactcataagtacatccttaataaataatccagtccactgaaagcagaaagcttgtgctttgtggagaggataatcaagacactgcccagcccttagcctgggtgtgtgtggtggagaatgtgcaccacagctctgtgctctgagaactggagcactgcagatgccttatgaacagagggcccagccttgccttctaagtcaggctcagtgcacctgtgtgactcaggggtctcggtcctcagctctgctggtaaggaatgaatgcaagttctaggacaaggagaggcctgagaagctgactaccaggacaatcttcaattatgtattgaattattgtttcttttttgtttgtttgttttgagacagggtttctctgttttctttggatgctgtcctggaacttgctcagtagaccaggctggccttgaactcacagagaattatcctttcttttttcttccttccttccttccttccttccttcctttctttctttctttctttcttttggtttttcgagacagggtttctctgtgtagctttggagcctatcctggcactcgctctggagagcaggctggcctcgtactcacagagatccgcctgcctctgcctcccgagtgctgggattaaaggcgtgcgccaccaacacctggctataatttcttaaattaacaataataccgagtgtggtggtgcacgcctataatcctaagacccgtgaggatgtcaaatttgaaagaggctacattgaaggactgtgtctaaaaaaacaggactggcaatgtggctcagtgagcaaacttactcgatgtataaatcttgatgatctgagttggatcatcaagttggatgtataaatcttgacttacttgatgatctgagttggagccccatgcggtggaatgattcctggaagttgtcaaaaaaaaaaaaaaactttctggaagtctgacaacttaggacaccagggtgaatttgttggagtggtttttgatggattggcattggacccattgatttttttgtttgtttgttttgtttttgttttttgagacagagttttctctgtggcttttggaggctgtcctggaactagctcttgtagactaggctggtctcaaattcacagagatccacctgcctctgcttcccaagtgctgggattaaaggcgtgcaccaccaacgccctggggacccgttgatttttaataagccagtctgcctgtagcaagggctgtgcacatgggagacaagctttgggagggtagcaggttctaattattccctgtaatggtataccttaaagatctagagcagggcaggacacaggaattagcacttcctcactcctgtctccacctgcatgacataattcctattctttccatctccccaagccactgtgaggatgatgtaggtgaggtataccatgtgacctaagtgtcctcaatgtattattattgttcatgggactacactttagatatctacttttattttatgtgcataagtattttgcctgcatgtatataatatgcatcacatgtgtgcagtgctggcagaggtcagaagaggacatcagatctccgagaactcgagttatggatagttgtgagccaccagagagatcgctcagtgacctaggttttgtagccactgctttaccaccaaaggactattcatagctcagcagctccaacacaggcaccgtacttggctcttcatttcatagactcaaatacagtttaacagtcagaagtgcagaatggactggtggcctaggtttgtactcctgctactcaggaggctgagaaaagaagatcccaagttcaaggtctgcctggaagacagagtgagtttgaagccagcctaggcaaatcagtgagaccctggctcaaaataaaaagtaaaaagcagggctagggctgtagctcagtggtagagcacttgcctcacacgcacgaagccttaggttcagttcctggtactgggagaaaaaagaggtaaagtggtgggtgctgaggaggtggctatctgtaaagtgcttgccttgcaagcatgaagacccgagtttggttctcagaacccaggtgaaaaagctggccatggttgttgtggaatattttaactaggcacctctgggagcatgtctttctcttagattgtgcataaacccagcttgtctggcattctccttgccttgtccccacattggtctcagctgggtccaggaggaggctgggtgtgtcggcactcccctggatcattctctcactgccctggagtgaggaagatgtggcttggcaggggaagtagatctgtgaggaggagatggccttgccttctgtcagcctggtcttcctttaacttctgacaggctgaatctgaggctttccaccatctctgtctcttaactcctttgctaacagagagctgacacttcctgtagactgggtcaggcaattggaacactccacccccagcagaggcacttcccgggcatcaggatccacacctgccattctcctaggtctaacaccaaaaacttcaggttccagccaatggcaaatctaatgcaaatagggtggaatggggatgctgttaatattcaggcatctgtactggcctgtccttggaattctgacaggatatggcctatccttggagttctgacaggatacgccctcagctgcagccactaagtaccacctgtgcacattcactattttctcttttaaaagggccttgcccacctcctctctccttctccccctccccctcccccttcccttctccttctctccctgtctctctgcctctctttcctctctcctagtgctccagtctccgaaggccagtctcccccctcccatttcctcctttttacaattcttttcccttaataaactcttgaactctgctgcacagtgtctttctcttgagccactttttttttttttttaattacaacagacgaaatggttagtaatagggacatgagtgggacgatgctagcaattctaactttgtcttctgccttggtgactgttcccctcccagagatgttgcctctgctttccctgtacttcaactctatagtccctatcaatcctggccacacctctttttccagtttcccatcctgtctggtgagtggactacatctctgtatgtattggggagccaaaggtcacccctagctctccctgtgagtccctaacagggaactgggtacctataaggtgactcagagtggacacaatgaactcagatgacactaagcttaggaaaccacttctcagagcctgtagaagacatcaggattgagactagaactcacaatgccaccgaaaacctctgtatcgtcaagtaacaattgttccaagttacaactgtgctgggtatgatggtgcacacctttaatccagaggccggctaaactctgagttccaggccagcctgggctacataatgagttccagagcagccagggctacatagaaacatcctgtctcaaaaacaacaaaaacaaaacaaaaacccaaaccaaaaccaaaacaaccccctcccaaaaaaatcccacccaaaacaaaaacaaaacaaaaacagccctttgaattacaattagacacatatgttcttttcttttctttctttcttttttttttttttggttttttgagacagggtttctctgtgactttggaggctgtcctggaactagctcttgtagaccaggctggtctcgaactcacagagatccacctgcctctgcctcctgagtgctgggattaaaggcgtgcgccaccaacgcctggctttgacacatatgttcttttatttatttattttgttattttgagacaggtttttgtttatttgtttgttttgtttttttctgtgttgtcctagctgacctggaactctctgtagaccaggctggccttgaactaagagattcatctccctctgcttcccaagtgctggaattaaaggtgtggggcaccacgtccagctaagcacataaattctagctcaagtgattttgaagtgagatggaaagtcaggaaaaattctagggctgtaggaaaggaaagggccaccacctcagagtctgattgacacttctcaggagctgagaaacaggcattgcaacatagcatcagttgtgaaagttatgggcacaatgctacgtctaggtcgtatacatatttcctatgttaaggcctcagctggggcctcactttcccccacactcccagacatattttgagggtctccaacatgatgatccactttgtttacagtgaagagatcctggcttcctatatcccagggacctagagtgttaccttatcaattgaaatgctgtctgtgcccctcagggccaccttgtggtctcattcagttctaaaaaccctttcaagagaagagatttagaacccacccaaatgctatacttggctgctataaacatagtgaagctgtgtctcttagaagccacacccacaactaagcctcacccacaacctgtgctgtgtcttttctagatcttctctcttaacacttgtgttttaaaacatatatttaagaagtctttttatgccgagtgttggtggcacaagcctttaatccagcactcgggaggcagaggcaggaggatctctgttccagaccagcctggtctacagagtgagttccaggacagccacagagaaaccctgtctggggtggagtggaatctcttttaataaacactcactctgctttatactggcttgtcctgaaattcttttctactatgagccaagaatcttgagtctccagtgtggagttttctgagaagagcccttggagttgctgcaggtgacagaccccccagaggaatgaggtcaagggagtggggtttccagaggaagtgaaactttgacttcctcaccagcagggacacagaccagctggctggagcccacgctatagtcatctcagccctgaaggtcaagttctccagcgtggggtgggggagtcacagaatcgacactcaggtgccgaagagggtcctgctccttccttctgtctcatgaagtctagaagtcatccccaacgacacccaggaatgggtagaaggacagaaggcagggggaaaggtgcatgggggtggggataaaggaaagggaagaagaaaaatactttcctcatacaacgtgccgcctttgctgtgttgctgttttctattagtattgagcaataaccctgaatcagggccaaggctcagctgtgcctccaaaccaatctgcagcaagaaaacagtgcaaagaaagatgttattcaggcccccaaaatggccttctctctgcccattctccccctccctcaaattcttcccacccacaggaaccatctctttctgtcctgtcccgtgatgggtgtagggggaagtaggagaactgccttccaactttcctccaagccagctggctgcccactgtgggtcatagtgcaccaagagatgccctccccggggaatgatctggacaccaaacagcagtcccagatggttgttatttgctaccacacaggggaacagagggtttttcctcttgcttacactgtacagtggtactcagaggcttttgtttggggatggctttttgggagttgatgaggggctctgacaagatatggggctgcttgttccttcagggacagtaacttagttttcaaactatagttttcaagagtcgagtttttaggtgcggaggagctggcttagtaagtgctttctgtgaagcttgaggacctgagttagatcaacagccacataaaaagttgggtgtggtggggtggtgcacgtctgtaaccccagagtttgagaggtggagatggaggatcccatggactttctgggcagccagccttagccagttggtatgctccaggtccagggagacccagtctcaaaaaacaaaataaaataaaaggcagagggctgggcatagtggcgcatgcctttaattccagcatttgagtaacagaggaaggctgatctctgtgagttccaggccagcctggtctatctagaatcccaggccaatcaaggtcactagtgagaacctgactttaaaagtgtgtgtgtgtgtgtgtgtgtgtgtgtgtgtgtgtgtgtgtgtgtgttcacacatacaaaaatgcaaacatacccacctaccccacaggcaggcaggcaggcacacatacacacacaagccagtcaatgtgtttatgtttgacttggccagttgcttgaatgagcagtcatttgcactatggataggactactttctccaaagagagtaaaatagaaaactgaggtggtggtacatgcctataaccctagcatttgggaggcctagtcaggaggatcatgagtttgggaccagactaagtggttcaaggccagcctgaactacctagtgagaccttacctcaaaacaaacagcaaacaaaacctcaacagtgaaaataagtgcaaataaaaaaagagttgaaggtttgaatacatgtctctctagactctagaaaatatacataaacaatcaccctgttctttacttttctcattgctatgacaaaatccttagcaaaagcaacccgaggaaaggagggtcatttggcttttagtttaagaggacacagacagcatggcagagttcatgtgtagctgggatccctcacctctggacagaccagtgggtccctagcaccacagcaccttccacactatactagcccaggagccttttaagtaaagaaatcttcagatgactgctgtccccactgccatctgatgccaacttctaggtactgtcagtagaagtatcctgttgaaattggtgttgcacgccaccagattttttgagtggtttattacacgtaagaatactggaccaccactgaaagtgattttaggaagttactgagtgaacattgcctggggaaaacaaatagagctccaacaataggccaaagaaactgctctatctgtcctggttattttttgtcaccttgatacagctagagtcatttggatagagggaacctcaattgagaaaatgtctgcatcccactggcctgaagacaagctttttcttggtttatgattgatatgagaggatccagcccactgtgagcagtataatccctgagcaggtggtccttgagggtataaaaaagcaggctgaccaagacattgggagctagccagtaagcagtattcctcctttgtctttgtttccgttcctgcctccagattcctgcctcgcgttcctgctctgacttccctcatgacagactgtacagtgtgagtcaaattgcttttggtcttggagttttattctagcaatagcagcataactaagatgctactcaagtctagctttgtggatcagtcagtttaattaaggttacttgcaggagtttgggtgagaggctactttacaggggcacgggcaacttgcaagtggatataccattgaagaaaaatgtcttgctaccccagtaactgctaatacattctcagggagggacagaatattgttaagtcataccattaactgtctataaatccttgagggcttggccttatgaacccctctctcattcatgatggaaagttaatgggtcccatcttgtttaggctcctgtgtgtgatccagctgctgagagctcaagagagcaattggccataccttttccagaaggagagcagtattctttttttggggggggggttaagacagggtttctctgtattgttttggaggctgtcctggaactctcactgtagaccaggctggcctcaaactcacagagatccgcctgcctctgcctcctgagtgctgggattaaaggcatgagccattaacgcctggcaggagggcagcattctaaagcagttttcactcacaccagtctgcataaggtaagaggtccttgtgcacagatacacactggagaagccaggaaagttaagcacacaggcttgtctcgtcaaaggaaggaaatgtttacctgacttcctccaggaatgctgggaaaggaggtaggttacaacctggtgatcttttgttatctgtaggatcaggctttacctgaatcccccagaatattatatttgtttatcccagatttccccctcataaatcttgagagttgcttcttagtacataaacccatccttatgggagatgtcacatgacctttacagcctaagtaacttcagtgttatgttagggccagaccaatcccgactcctacaggcattgtttacctcagtcatactccctagacccttgagcactatttctaagtcaacagaactcatctttatggaataagccatatatactttgtaaagagtttcaatgtaaatatatcttaagcattgttgtacataggggactgaattaattaccaccaggaaactgttatgataaatctttccgccaaaagccgccgagccccactgccacatgtgcgctttatgccagctgcctgcccaagttaggcccaaatgaatacacagaaacttgtattaggttcaaagctgcttggccaatgactaggattcctcatctgttagctcagtcttaactatcataaacctatatattttataagacttatcttatcggacgccttattggcgtccctccttgccggtggatcacattgtgctgctggaggagcaaggggaaaagggacccttcctgtttctccttcacttaaatatgagtctccttgctatgtcacttcctgcctggatcaccacttctctactacatttcccagaatcctctttgactcctagtcctgtctaacttgctgtctcattggccaaacagtattttatttaacaatcaataagataaacatacacagtacattccccatcaggaaacttttttccaaagttgttatgtgcttaaatatggctaaaataaactgcctggtgtcagactccagaagtttggcccagcatcagttaactaattcgtgttgaactgagtttcattcttacctcaccctggtccttttcctagtgatgttgcagggacccacacacaggcacagggactaaattccttttgttgccaaatacagattgaaaatcagttcttcataccaatctctgcccctctcagctctgggcagctgtggcaggtgctttgcattggctcacccaaagtctgttttctacaaatcctgggtggccagatagtttctaattttctccaggaagatctcacagtttataatcttctttggtccatgtgaggctaggacagctgttgaatttttagaaggaaaaaagtctttctttattgataaggtgtgtcactttccctaggagacatgaacaaacatttattcaccccagatggggcacagatgacagtattgatttcaccagtgtccaacatggcaaacccatgagtttattggacttacttataaagcctgagcaagggtttataggaacatggatgactccaaggcagatacattactgaaaagcccacctcagcacaaaatgagaattcatgaaaactgcatccctagagctccctgaacctcttgcagacagttcagcaagcctgggatctccacttcccagtaagctcctgtgtatatgactcccaggaaaggccttgcctgtcttgtaagtttcaggagcatactgagacttgtaaaatgtctattcctccagcctggtaagtttcatttcattaagctctgagttttaaggatcctttctctatgatggagtgtcccgacctgcagggcatcaacctgaggcaagagagtcagggatagggaatggggacaagagacgcagaaagaatgaccacaagacagaattctgatcaagtggcaaactttacttttctcaggctagcttatatagtcaggatatggggaggggcagaatgggttgtttgtgtaccaggtgttagtataggcaggatattaggaagctacaaataggtaggaggatgtttggcagggtaaagagtttatgggtaagaggtccaggaaggggttgcctaggtgactgagcctgtgggtggaggactgggtcaagttgtttcttttcttgagctgaggttctaaggagctgctatgtaaaggttaattaactatgtggcctgccaagcatggcctaggatctcatgccaagccctgagatttggctcccaacaatggagtgtttcaatgtagaggaaattgctacacaaccaaagggcaaatctgggagatgaaaattttttgatggattaatgggggaagtccttctgtgtatatgtttgtttaattggttgataaataaagcactgttggccaatagggaagcaagacaggtggggttaggagtcaaggagggttctgggaaatgtagtaaaaggagagtgaccatgtgatcccacaaagagaggacgcatgccactggcgtccttgataagtctttataaaatatatagattaatggttatggttaacacttaagacagagctagaaaataagaaatcctagtcattggccagcagtattgtaactaatattaatctctgtgtgttatttgggacctactgaggcggcagaactcaggcgactgttggaaagaattatcgttacaatggatgtggggtaaagatgtgatatgtgtgtcgaccattttaatacccggagaaaagaagctataagaactataaagatcacagcccagagccccccagtcttcctaaatgatagtttatcagtcatgcctttctatctgtaattgaaagcacctgtgtcaccagtgtcctcattttcttatgtttcttgaaaagcaggagaaatcatttttgtgtcctccatgttgagtcaggtgggtttttttgttttgtttttaagacagaattttggagtgttgagaacaggccatatgctggctccaagttactccatattgtataaaacagtgctggtttttttccccaggttaggcttgcccataatgactccattttacaagcagtttttggcaggtgaacagccttaccactcttcaccacacaaagcacagactgataaataccttattcctaaaaataaaaagggtgtcaccctataaatttattaaaattgggatcattgagaattggggggaattgaaataatcaggaaaatcaggcccaagaacctatcagactcaccaaagagaggaaagggcacagcaccctcacctgaactccatgaagaggaagacacttaacactaatggcaattacctacacctgtcacctgttatctcattcagagtatggaaaggtgctgacaggcaaggaactctctactgtcccagggacttcagctcatcttggttccaactgtattcaaattaccatcggtctctccacccattcatccatcaggacctgctgtccatttgttcaccaattcatgtacccggacctagtcaggtcttttgtctctgtgataggcacccttggccccgcactttgactctgccatcttgcctcctcattgaggtctggttgagctctgacactttggcttgactctgcagagatatctccagcagacctccaatgggttagttggttgaacgccacattccactcttcaccttcccataaccacttgaatagagattcttcatcctcatcactttaccacctatgcctgtcagagaggtctctttggaactcactgaactctgctgtggccactttaaccattgtagtcattcagcaagcgtgtgtgtgtgtgtgtgtgtgtgtgtgagagagagagagagagagagagagagagagagatgtgatctgagagtttatattagtaatgaaaattggaacaaaaaacctgtatttaccttggccagctgtcaaggaattcaagactacttggcaaatgggtgccaatgaaactggagtacccagggaatttcttgtcacttaataaatcctgacagtgtggaaagtcatggccatgttcgttaatatttctgacatagctctctcactacatgggggaaagtggttttctctgggcttggtatgaccattgtttgtcagagagcttcctacagtcacgtcaccagaccctagaggtccttctacctactacattccactgaaacaaatcaggagaggatggccaggagacatataattttcaagtctaagcttgggagaatgaagtaaagactatctgtctcacagaaagtagtcccccaatctgaaagtggtggaaacaatctcctgtggggtcatgtttgtggcacaataggcggaagagtccctgtgttaggggagtccatgtcctctgacatgctctttgaagttttatatgatggacaccttctcttttgtttttctttttttctttctttgtttttgtttttcaagacagggtttctctgtagctttggagcctatcctggcactcactctgtaaaccaggctggtctcgaactcacagagatccccctgcctctgcctccagagtgctgggattaaaggtgtgtgccaccgacacctagcaacacctctatttttctctttcaaaatcaacttcaggcttgagctcctaggtttctgagaaaacaggaattttcacgtggaaaagaagataaccactgggcgatggtggcagggacaggcggatctctgtaagttcgaggccagcctgttctacaaagtgagttccaggacagccagagctgttacacagagaaaccctgtcttggaaaaaaaacaaaaaaaatgatgaccgagggaatggggaagtataacacatatatctccctgaattttaaaggtcatgtgacaaggataggttgttgaagattaggcaaagtggggtgggataaacagggctttgtttacattgaatatccaaagaccatttcttccaggcaatgcaaggtgctctctctctctctaataaattcatctttatctatctttctgtaacttttagtcaactctggtacattcctgacaatacaatgaataaaataatactattatagctaggtcaatgtaatgacaatggtgctgctagcactttgaggtagcaggagactcctcaaagctacctttgctacctttgaggtagcaaagctctggtgacccagagtcacatggctcacagaggactgagcaagaagtgtctggtagaagacaagaatgagctgtagaagattttgctatgtatcccaggctggtcttgaattcactatatagccaacgattactttgaactcctgatctttcttccttcagctgtctaatagtgggattacaggcatatgccaccatgcttggttttatgcagtgtgggtgattaaacagagttttgtgtatgcttggcaaatactgagctacgttctcagcccaagccaaagaatatcctgctctgggatgaatccaatgctttgttgttactgtttttgaagcagtttcctgtagctcagcttgactttgaaccgctgatcctcctgcttttctgcctcctgagtactagtactgcaggcatgcaccatggtgcctgacttggtttggagatcttatgaccacagctatgctgccagcacccaccccacccccttgactggcctcatgtgtgctgtaaacacggctggaactacaggggaggtctgagaaagctgggaaccctggcctcaacagaaacatgattcaggttttctctccagctccctgggcggctgaactgctgggaagttccctgggaggtcagtactcatgatgcctgccagctttcctggaaccttctgtacagtcagccaagaaaggaagcctgcagggctctggaaccactaatcctcttctctcacccacagggtagcagggaaggttgctcctgccttgccctggccgaaggccttcaacaacaataatactgagtaggagttctgttgccatttagtgaatgctttggacatgctgcaccgtctttacacttattatttcattaaatcttttcgactaggaaaaaaaagaaaaaagaaagaaagaaaaaagcatgctagggggatcacaccagccaagacctgccatggcaagaaatcccactcaggtgagttgacattattccctctttcaggctgtctgtctccataaccgagaggggaaaattcacagcacagcacacaaggactgaaagctctggtcctcaccacctctcacttccttccaatgcttcagccagcgcattcgtatcacaacaccctctgcatatgctcttccctctgccaggaaagcctttgccaccccccactcaatcttcccatggtcctcaccaaatcctatccatggcccaacactccattccctcccatggaccagttaggttccagggtcagggtctgagtgaaaactctcacatgggaagccatcatttctgctctgcagggctgattcagctttgtgtcctctaccctggcaactgatcaccctgttctgctgagcatcaggtaaaggggttgccttgcgttgacagactgtgatgcctgttatttagaatttccatggaaacatgtcagggatttattctgagggtatttccagaaaggattaattgaaaagtcccatcttgaatgtgggtggtaccaccccaggagctgaggttttaattttttttaagatttattttatcttgcttacatgtatgcctgctcactctgtgtgtgtgtgtgtgtgtgtgtgtgtgtgtgtgtgtgtgtgtgtgtgatgtgcctggtgcctatggaggtcagaagacagtgtctgattcccctggaactggagttacagatggttgtgagttatcatatgcatactagggaccaaacctgggtcctctgcaagagcaacacatgctgttaacctctgagccagctctctagctggggttttagaggactgagtacaagcaggcatgccaacattagtcctgtctgcttcctgactgtggatccaatgtgaccagaagcctcgtactcttgcagcctccacttctctaccagttcctgcctgcaagctatgagctagaagaatcccttccctcctttagtctcatcttgccaagtatttggtcacatcaatgagaaaaataactaacacaggaaccatgtcatatattagagctattctgttgcaggatattcctttatgctatgtgaagatgtagttgtctcgacccacaggacagcaacctagagcaagaagtccagggaggagaatggggacaagagacacgagagaatgaccacaagacaggattctgatcaagtggcaaattttattttttccagggtagcttatatagtcgtatggagtaaagaggagggggagaaaaggccaggagccaggtgttagtttaagcaggatgttagaaaactatagaaagaggatgttggcagggtaaaaagttcatgggtggtggggagagggagagttacctaggtgagtggtgggaagaaggaaggtagtttaggtaagtggtcctgtggttggaacaaaggattgatgtctgggtcattttgttccttctgggtgctcatgcttctagaagccatttataatcaaaagacagttctataaccgtgtggcttgccaagtttggcctaaaggttcatgccaagctgtatggctcccaacatgaagatgagtcattgtgattggtttaataaagagatagctaggcaggagagaacagatgggacttctcggcagagagaactctgggaagaagagaggtggagatgccaggggatgcagaccaagtcagaggtacagaaatgaagaagcgtggggacggctacgtggtagaacatagattaatagaagcagattaatttaagttataaaaggtagttggggacaagctaaaggccaggctttcataattagtaagaagtctctgtgttgtggtttgtaggtggtggccgaaaggaaagtcgtactgcattattctcagcattataatgtgctcccagaggaaatggccgttctatgccctccatctcacctgtattccgaggctgacacctttcgaatgagatgatggccagagtaggagggctggcttaggaaactttctggaggtgaccaccataggttcacatcatatgtaaatattacctgttaggccttaatgtcttgtaggtagcaaaaaggcactgaatatataaagccaagcatggggatgataattctatatttctaaagacacttgaaagggctggagagatggctcagtgagtaagactatgctgtgtaggcacgaggatctgggtttgaatccccaccacccaagtaaagaactggatgtggtcatacaaacacttgtatgctcaacattgtggggcagtgggcagggacagacaggaggcttgctgaggcttgctggttactctcctagctcccagttcagcaaaaggtgtcatttcaagggcataaggaagacaggagtagaacaagacatccaatgtccacttgtggtcttcagtacctgcacacacacacacacacacacacacacacacacacacacacacgaatataatgtgcacgtaatatatcagggcagtggtggagggacgggggagacagataattacttgaattttcatgaagaggggaaactggggtacctacaaagtagggagcttcacataaaatcttccatacttaattttaatactttttgctgtctggggaccaaacccagagccttgcatatgctaggcaagtactctatctacattctaatccttaaagttcattactggataaagtagggaaatgctgagatcgaatccagctggtgttgagtacatagaattttataaaaatggcatcatgcaccaggtggtgatgatgcacacctttagtcctagcactcggaaggtagagatagatggatctttgagtttgaggccagcctggtccacaaagctacacagagaaaccctgtgtggaaaaataaagtaaaaaagaaagaaaaatggcatcattgtctacttttctgtaagaatgatatttcataaaaaattacacatggatacatgtgttctcctgtttggtactgtggtgggccaaataatggctccccaatttgccaaggttcttatcccagaatgtgtgcaaatatttattaccttacatggcaggtgagatcttactggtatgactaaggattctgaaagggagaggttcctatggcttgtccagggtaataacataggtctgcataagaaagtgacaagagagccaggcgttggtggcgcacgcctttaatcgcagcactcggaaggcagaggctggaggatctctgtgagttcgaggccagcctgatttacagagcgagttccaggacaggctccaaaacaatacagagaaaccctgtgtcgaaaaacaaaaaaacaaaacaaaacaaagaagaaacaaaagaaaagaaagtggcaagagcatctggaacaaaagaagacatgaagatggaggtgggagatggaatggtgtccctctcagtgaacacgggctgcctctaggaggcatgaaggcaaggaatagagtctgtttgcagctgctgctggtacttgtttctagtcctcggaggattcattttagaccgctagaaccatgagattacatgttagtttttttttattattttatgtatatggttgctttgcataatgcctatctgtgtatcacatgcaagcctcgaacccacagaggccagaagaggactttggctctcctggagttacagacagctgtgaccaccatgtggatgctgggaattgaacctgggtcctctggaagagcagccagtgctcttaaccacagagccatgtttccattccttactggtgttgttttaaaacatcgtctgtgagattggagaaatggttccatatttaaaagcacttgctctttcaggggatcagggttcagttcccagaaccagtatggtggctcaaaaccatcatatgagctgcatatacacacatacacatgaaataaaataatacgataaaaataaaccaacaactcttttaaagacatttgtggtaagttgctatatcagcaattgggaatgaatatgagtatgatcagcgatttggaagctcatggcaacatactttactaacaagaggccaaggagaatatcttgctaagacagtggctctcaaacttcctaatgctgcgactttatacagttctgtataaagtataaagttttgtataaactgccctcatgttgtggtgaccctcccaactataaaattattttcattcctatttcataactgtaattttgctgctgttaggaatcataatacagaaatctgtgttttccaatgatcttatgtgacccccaaaaggggtcctgacccacagattgacaaccactgtgctaaactgtgctaagctgtgatagcagagctggctttccagagctggttccctccatctccaccccactctcaccttgtgactgtgcttggctctctgtcgctctgtagagatggtagagcggctgtagagggaaaacggaaatgcaaaaggcttacaagactatgaactcagctgcacagaatggacaccataagatggcctcaggtacccatgcctccaggaattctggggccaagatccaaggtagtcctgtcgagtagttcatctgctcaggcttgctgtgggtatcaaactcaggctgccaggcttgggagcaagtgccttcgcacactgggccttgttgccaactccacatttgttctctactctaaagtgacttctgagaacgaaaggtccccagacctgagtagaaaccaggatgtagctgcaggcagcagctgtgtttgtgttggcaacaacctatttcttaaatctacgtcagaccccaatgtgcctttgctgtctgtgtccttgtagtatgttttcagacatggctgcggagtctgaatcagcaacagaaggtgggacctcaagtgtgtctaggttattccagaatatccagtggcaggatccctgaacaaagaaaggtgaaaacatgtctcagtgctgggcggccttgtaactaagtgttctcaaaggcatgggtgaaaggttcaggcattatgctggcctacccctgttacctggtggaatctactcaggcagtaccctggtcagcccagtattccccgggaactaagtctgcacacgcaagtgtagaggacccctttaaagacagagccttgcccatttacgctctctctgcccctcttctcctctctgcctcttctcttacgctctctctgcccctctatggcaacggcatggcggtcagtcattaaccctgttcctcttctctcttagtgtctctactcggccaggcctatgataaactggttaatatgtctcttagtctcatgtctcatcctgcgcttcttctttttctttctttttaatttaaggaaaaacctaacaatgggggcaagggcaaggggggtgaagactgattagaggtcacaggatgagctgatcaggcatcctcgggaagagctgagtcatggctattgttctcaggaaatgaaagggatacccctgcattcacaccagccactttccccaggggaagagaaatcgatcagagtgggcgcaaacagcagccattttgttgcttacatgcaagtcctattaaaggataagtgtgagtgactgtcacctccagaggagagactgcactccttccggaacagtcagtaagaggaggtaaaccgagggacggttgtccccaacacagctggactgcataggataagaggctcggggagcaatgagcaggcgctccctggaggaaggggaacaggcaggaagagttgacattgctcagacgcagctccctcatgggtttaggattcaagttgaggcagaagaaagggcaggtagatgtgaggctatttaaacacaagaaaggaaaaggtagccaggagagagaagagctggagcccaagacaagactggggaaacatgaaataggtcgtcctagtgaactttaactgccaacttgatacagcccagagtctgccgagaaaggagtctgactgagggattgcccagaacagattgtcctgtgggcatgttatgcaggactgtcttttgttaactgttacaggagggtccaggccactgcaggtggcaccattccttgggcaggtggtcctgagctgtatgagaaagttaaataagcatgaaactgtgaaccagtaagaagggttccttcatggtgtctgcttcaagttcctgcctgaattttcttcagtgatgaactgtgacctggaagtgtaagttgaaataaaccctttcctctcctaaattatcacagcaacagtgattaaactacaacaacgggccgggcgttggtggcgcatgcctttaatcccagcactcaggcggcagaggcaggtggatctctgtgagttcgagaccagcctggtctacagagcgagtgccaggataggctccaaagccacagagaaaccctgtctcgaaaaaccaaaaaccaaaacaaaacaaaaaaccctacaacaatggtcagtaaccgcgatgggtccaaacaacacaaaatagaaagaaaaggaccagggaacaatgggctccagagggaagaacacaagcctcagaaccatccagctcgggaagcagcacttctgcagtccctgggactgggtgacacaaagggggctaagagcatgcgccaagcacaatgacaagtgccctgctgtgtggctgggctgagaggctttgcacagaaaacaaaatgtgatgttggaatctcaaatggcacagttcacagtcaggcatggtgaaaggttcaggcattatgctggcctgcccctgttacctggtggaacaggcagtaccctggtcagcccaaggttccatgggaactaagtctgcacgcaggtgcagaggacccctttaaaagacaggtccctgcccatttatgctctctgtttcctctctgcttcctctctactctctcacctatgtgctcgctctgtctctctatggcgaccggccatggcggtcagccattttacccctgttcctcttcttagtctccctactctgccaggtctcataataaacttatagtcaacatgtctcatgtctcagcatttctcttttcttctttttaaacaaaacaataacacatggaggctcacaatggtagtctcagcacctaggaactgcggcaggaggattgctttaagttggaggctatcttgaggtacacagtgagtttcaggctaacataagactactgagtgagtccctgtctcaggaaacagacattaacaagacacaaggttcactgcaatggggacaaccagggtttggctcagttgtggttgttttagagtcagaaagttgtaccttacttaatatgttatggtatgacaccagagtgtcaagctctgtgcttatgtggctttttaccttattgcttactaatgatgagaatctcgagcctcagttttgtagcctgcaaattgggtgtggtaagaatacctactaataatttggtgaatattaaactagtagatagatgccatgtgcttagaccagtgtccagcacatagaaacgtccactccatgttagcacaggtagtaatgacttgctcaaattcatgaacacacaactttaggacaggaaataaaagagcctaagttgaggacagagaaggtgctttggagtcagctacaaatgagagctatgtggtgagtgtttggaaaggcttgttttgtctccatggtttccggaggacatcagtccgtcgtggcatggaggatatggtggtgggaggggctccatccttagcaacaggagtgcatggttggggctcctcacatcatggacagagacagaaagtagaaagtggtaaaacccccactaagttgcccttggtgactcacttctgcctgttaggccccaccttctaagggctccagagccttcaaatagtgccacaagctggggggggggggtcaagtgctcaaaacacagttttcatatggtaacatggaaaagctatggaatctaactccaggtgttagtgtcagaactgaactccaggacacccagctggtgttggggaattggttgctgtgggaaaaacctgtatacgtatgcgtgtgtttttttgtttgtttgttttgttttttagtgtgtgtgtgtgtgtgtgtgtgtgtgtgtgtgtgcatgtgtgtgtgtgtgtgtgtgtgtgtaaaggcaaaaatccgtgtctttgtcaatcattttccactttagtttttgagacaagatctctcactgaacctggaggccatcgatttgtctggactgtctgcctagccacgccccagggattctgctgtctcaatctcctcagtgctgggattataggcctgtgctgccacacctggcctgtctgtcggttctggggatcaaactcaggtcctcacgctgtgcccaagcacttatgaaagcagtcatctccccagcctcccaatcctgcacatctggtgacgagtcagtcacttgatgattgatgtgtttgtgtgtctatgtgtctgtgtgatgggacagtgaaaggcccgctgcctctctgtctccccccgcctatgctgatgctgggtgttctctctggagcagggcagagccaggataccgccaggggctggagagtgcagcgcgggcgagctgccgcagagccgccctgcttcccctttatcctgccgtccctgcccccgccggcctccacttcccccggctgccgttttccctcccaagccggttcacccaggcggggctgccctggcaccgcgccggggctggggccgagcagggaaagggcacccctcgcccccacgccccccccccgttgagaaacactccgtcccaaggtctccgcccccaaggtcagccacctgggcgcggagggaggaatcaagtctgttgtaccagacaccagaccttgagaatatgctgatctggaatggctctgtgcctcatttgaaccatcaaatagaatccctgctcctagcttgcgcctttttccctatataaggacccctttcccttggctcggcgcgcttagccacacaaaggctaagtcgccccgggtacccaagtctccaataaagcctcttgtttttttgcatccagttcgtggcctcgctgattcctgggtgtgtgagtctccctctacgaaagtgcctcttcggggtctttcaacagtaggggtctttttatgggagaggggatgggaaaggtggcacctgtaattgcagagcacacagctgtgaagggaagagctcagcacacccaaagcaacaaaagcaggcatcaatgtggggggtgaggagagaaaaaactcatttgaaacccttgtttatatacaagtgaattagaaagcctgatggctgagttgctgccaagacaaaaaatctgagttctgtgcctgggaccagtgcagtgaaaggagagaattgactctgatgagctgtcctctggcctccaccacatgtcctgacatgtgtccctcatcgaataaatagatgttctaaaaattaaagtaaattagagcacatgcatgggaaataataaccagaagtcccaagaatatagtgaaagatgcagtaaacacaatagtttggctgtttatgggggaaggggacaggatgaaaggaaataaacatttaaaaaggactgaaaccaaaggtttattacagaaattggcaaacagtgagtcttgtactcccattagtgatgatgcattaatttaaaaataactgaagacagcaaacacagccacgcctggtcataagcactgcctagtcctagtactagggaggctgaggctagagggtcatgggctgaggccacgctggactagagagccatccatgatgtaaacatgatgagtgattccttcagcatacatggagggtggacagcttttcagggttggagagatggctcagtggacagggacacacacatacacacatacatacacacacacacacacacacacacacacacacacacgtcagttaatagatgtggaatgacaaaacatacctggtgagagtcattcagaaaaatatacaactcatccaactgttgtcacgattgggaaaaaaattgtttcctaatttcttcctattcctcccctttaatttaaggcacaagttaggtatggtggctgttaggtttttgcttaaattagaaataaagaagtgggcgcaagatgagacatgagactaagaggcatactaaccagtttattagaggcctggcagagtagagagactaagagagaggaggaacaggccgccatggccggttgaaggagaaagaggcagagagcgtaagagaagatgcagaggagaagggcagagagagcgtaaatgggctggggtctgtcttttaaaggggtcctctacacctgtgtgcagacttagttcccatggaaccctgggctgaccagggtactgcctgaggggattctgccaggggcaggccagcataatgcctgaacctttcagtggcccataccaataaccccagcactcaggagcctcaggtaagaggattgctgcatgtttgagtctagtctgaactatctagtgacttctgggactgagcaatggatgagctcctgtctcaaaaaaaacaaacaacagattaataggtattggttgtcttctgaaaggtctgagctagagttagggttgtctctcgtcaagaccacaaaggcaggaaggttatctgtctcttcaacctcttcttccctggtggtgaagagtcatcgtgagctcatggcccaggctgttaggattgctggcgggatgcagcgccctgcagagtcagcgctgtaggccctgtgaccaggaaggagaggcagaaagaactcagcaggctaccggaaatgagtcagcatctctagcacctggatttcggaacagggctgcagacgtctccacttgaagaaacccatgtgaggcctccgttattacatcaggggagctgagctcagcttgcacatggctatcagcagacacaggacatgacagcgtttgtttggaccacaccccaacagttacaaggaaatggagtagaaagcccagccatcatgactggcaggaaacagccatcatgggcaccggtttatgtaacaaaaaccactttttcatcatacaagggaggcattgcatgtgcaagaaccaaacccgcttcaggctcatggtttctgagcacagggagcagtgcaaaggtctatgacctccccatgcgaagtcatccagtctgtggtgactgtggccccacaagttgtaattccctctagggcgctggccatcccgtcatgagtcatgagttcacctttgtgtcgggtgggaactcgggctcttctgtttctaggtcatgagatttaccatctgagtccagaacccttgcttagctgctgcttttctgtttttccacagtggagtttctttctttctttctttctttctttctttctttctttctttctttcttccttccttccttccttccttccttccttccttccttccttcctttctttttctttgcttctgttctgttttctcctcttctccttccctcttctgcctccctccctcctgccttccttccatctttttttccttcctttctctttgaaatagagttgggccttaataaagctgtcttggggctggagagaaggcacctgcgttcagttcccagcacccatgccagcggatcaggtatctcaggacctcatgcccgcctgtactcctgtacacacttccctaccccaacatagacatactttttaagattatttttaaatgatgtttcaatataggcttaagcgcaagggtttagagagaaaaaggcatgggtgtggacttctcaggagagacttccccttccctcggcttctctcccctccccaccctttctttttctccctttctttctttctttctttctttctttctttcttttctttccattctccctcttccctccttccttcctttcttcctctctctctttctttttggtgtgtatgtgtatactgaagggaccagctccccattttggcaactataacagccgaacacatgcttttctgaccttgccttggtcactagaggttaggtgcctgcctcgtggcaaggaaccaatcagaagttagctggtggtgctatgctttatggctttgggtgtgctttacagaaaagcgcacagcaatgatgcagagagcatagaaaccaccctgggagggcctatgggccataacaaccagttgccctgtgttgacagtttgaaggggctgcatagagatcttatagggcagcgtaaggggagtgtctagggggtatgcacaggctcaggattggtgtgcctccaggcttggagggcttgccctgtgttgattggtcaactggttgttatggcccataggccctcccagggtggttgctatgcttttcggttttttgagacaggttcactcactgacctggaactcgctgatttagaccaagtcccaggtatccacctagctctgcctccccagcgctggggattttaagcaatgtcagcacacctaactgtttttgtgtgtgtgtgtggggggggggtctaggaatcaaactgatcctcaagcctgcccgcacaagcctgtaggcacttcactgactaaactaatctctccagcccagcaccccacttccactgtccttccttagcctgctcctcctgtgctgaccggacccagtccacacctcctgtactgcgctaacttcctgagctggtgatccatggtgactctcatttcactgggccacacttttgccagacagcccagtctttgatggggatctctttgctacctaaatgcaaaatagccagggcttggtctatattctaggtctttctaagctcttgatcagaatttcaagttctccttagacttacgatgtaaacaccataccctttcctttcactaatgccctgttccgtctggaagtcaaggttggtgccacctaagtgagttcctgctgcaagggatttgaggacatcctcctccttcgcctgcagggcgtcaagggcttcagaccttgtgaaagtttccttttacgttttgatgggaatcaagaacaatgcttcatgaacccctccctggacagcacagagcgatatttatgttctttgtctgcttgaaacagggttcttccgagtagacctgacgacctagatgctctggaacttgctctgtagaccaggctggcctcaaacccacagagatctgcctctgcctcctgagtgctggaactcttctataagactgagggttgaatgtggggcctcacatatctcacatatgctaaacaaatgtcctgccattgccctgtcttcccagccttcatttttatttttattttgagaccaagtttcaccaaattccccagttagaccttgaatttagctgggtgttggtggcgcatgcctttaatcccagcactcgggaggcagaggcaggcggatctttgtgagttcgaggccagcctggtctccagagcgagtgccaggataggctccaaagctacacagagaaaccctgtctcaaaaaaaaaaaaaaaaatagaccttgaacttactctgtagaccaggctgtccttgaccttccaattctcttgcctgggcattctgaataacagcagatattccactatcaaccgagacatagtttagtgaagtgtttttgcttattttatttcttctgtacagtgcttaaacccagggccttgggcttgctaggcaaatgttctatcactgatccacaggccagcccttaaaaatactacatattgtgtgttctcatgtatgtatgaaggcaaaatttggtctcaaatataggggctggcaagatggttaagggggataaagatgcttgatgtgcatgccttgatgcctgagttcaattcctggaacccctatagaggtagaggagagaactgactccacggagttgttcactcactctgcacatgtcccatggcatgttcatacacatgcacacacaccaaaaaataaaaaagcaaagctattttattgttttttgagacagagttcctttgtatagccttgactgtcctggaactggccccatagtccaagctggccttgaacttacagagatccacctgtgtctgcctcctgagttttgggattagaggcatcagccactaccacctggtcccaggagcagagtctcgaaaacactgagaatgcacctatagcaacttgtactttgtgtcctaaatgacaactgagaatgctgtgtaaatagacactgctttggaaactgggagatgtctgtagacggatggcagaaggttgttagactgggagtgacctgtgtgtttgtgtgtgtgtgtgtgtgtgtgtgtgtgtgttgtgtgtgtgtgtgtgtgttttgactagaggacaaaggaaagtatgcaatgatacaggactggccagagtgtcaaaggcttcttgggtggtgaaagtgtggtgattgactcaggtctgtatctgttatttatattccaagggttcataaaacagactgaagtttgtccttggtgttgctcattatttctggggctgctgcaataatagtaattgctttggaatgaccaaggtcagcaagcaaatgttattcttttgcttaaattagaaatgaagaaaggcgcaagatgagacatgagactaagagacttattaaccagtttattatatcatagagagcaagtgagagagaaatagaagggaggaggagaagaggcagagagagaagagaagcaaagagaagagagaaaagagaagcaaagagaagagagggaagagagaggagagagtgtaagtgggcaggggtctgtcttttaaaggggtcctctacacctgcgtgcagacttagttcccatggaaccctgggctgaccaggacactgcctgagtgaattctgccaggtaacaggggcaggccagcataatgcctgaacctttgaatcccacctttacttttttgttgggaccataagttaaggggccattcagagcagtggaaaactacaggtccttgaaggacttgccacctggcaactgctgcccctagctgttctattccaggaagagataagcagctccgaggacaagaaacataggaggttttcaggcaacaggcatttttagatagccttatgcaaaacaccaggtgcactaactccctgctccctcctcagttcctcctccatgcggccccaaggtccatcctgggagccccaccgccagcggccttgctcccttctcccccctccctccctccctctacactccctccttgcctcatccctatataagtcttattattccctcaataaagtgagaccttgacaacagaattttgcttggtctcttttctttctcttgcccatgatatcttttaggcagtacctcttcagaccctggaataactggaccttcgggacgggtcactttttattaaaaggtgtggtgttagacatggtagattaaggaataaggtgtcaaattctcaagactgcttcctgctgacctggggggcgttgagcatctttgggggacccgagaaggttgggatgctgccatgtcctggggcagctggttgtttcattgcagtccaagctgtatggaactcccttgcacctcttagatctggcaagatgttggcagagcagaggacaaggttaagtttagaattttttttttcttttaggtcctggcacttgaagggaagattgtaagatgagggaagggttctggaggggtcccaacatgagggaagggagtcctggggccagggaaagactgaataatatttatttggagtgaatctggtgaatcttacctgtttgtttggatccaattcggctcctggaacttaaaagaatcctttgagtttgtgaaaaggtaaattttagacacattagcagcatatttatattaaaaacaacttggctgaaaacattatgactatgaacaatagcatgagaaatagagaaatctggaacatatttcattctttttactgtctcaactcactttatcatcacttaaccctttttatcctcagaccttcaaaactttaattcatacaccttaaagtaaaggtgatggcattcttcactacagagaagccagaacatcccttattgaaggagaccagttaatgtcaccatattcagccatacagtcagttccctatgcaaattatgaaggaggcctagatcccatcctcaatgcttccttagggccatgtggcctgcctccaaagtccttggcttattgggtgccttagttacttttctattgtcatggcaaaacaccatggccaaggcaacttatagaagaaatcatttaatagggggcttaccatttcagagagtgagtccacaaccatcatggtggggaacatggcagcaggcaaacaggcaagtatcaaggccttttgaaatctcaaagcctgctcccagtgatacacctccttcaacatggccacacctcctaatccttcccaaacactttcggcaattatgggccaagcattcaaatatatgatcctgtgaggtccattcttattcaaaccaccacacattgggggtacctcttgttccctatggacatgtacccagaatatatttccggaaatacacagtaggaagagaatatgtgtgactgcaagattacactctcttcttgtcctgacacaaaggatcccatagttggggccaggcagcagcatctacatgggaactattagcctcagcagttatatcactcagacttctttccagaatattcttttatttctttctcttcaaatgctaaaccctgagcaaaagaaaaagaaaaaagaaaaagacacctggggttgaggtctggcctctacatgcacacacgagtacaggcatacacaagaacagtgcacacatacatacatacacacaaatgtaatcagggtaggatagctcacatctgtgatcccagtacttggaaggccgagataggactgggcatgaattcaaagccttcctgggctacatagggaattccaagttagtctgagctaaattatgagacctcaatctcaaaaacaaacaaacacctttccataccctccccacaaaacaatttaaaatttccttttttttctgggaaaaatgagtgcatctttatataagaatatggtaagccgggtggtggcagcacacacttttaatcctagcactcgggaggcaaaggcaggtgggtctctgtgagtttgagaccagcctggtctacaagagctagttccaggacagcctccaaagccacagagaaaccctctctcgaaaaaaaaaaaaaaaaaaaaaaaaaaaaggaatatgttagagatataattcttttcttaaaggatttgtttatttttgtctgtccagtccttcagagtggctgggtattcccctccctcccttccctcccctcccctcccctccccttctcagatgctctcaccccagtccattcaccacctgcctctctaccctctaccagtcaaccacttactctcctcaggctcgccttctccagcctgtcagtgcagaatgctgacaactgaggaatgtgagtgcagttacttggagattccagtcacataacattttctcacgtgtcaaacaaaatggagagttccatgtaacaaaagataataatttctccaatgagtcccttcccctccaccccttctacaatgcaaacatttaccatccctttgcctcctgctcctgcttaactgctccttcgacctgccttttgcagccatctgtagattgtaacaagtcttccagccaagccgcccaagccggcgccactgaggccacttgctcttctgtttttttttttgagataggttctcatacataccagactagcctcttaaaacactaagtcccagcagtggccttgaacttctgattttcctgcctcatcttctgagtgctgggcttataaaaatatactaccacgctaggtttatgaagcgctggggattgaacccaggagcccacacttgctggaggaatgctctccaagctgatgtatattcccagcctcagctatgtatcccccaccctctgccacacacacacaaggttcctctatatagtgctggttgtcctaaaacttgctttgtagaacaggctggcctcaaactcacaaagatctgcctgactttgcctctggaatgctgggattaaagacatgtgctaccatgcttgtcttgtattttttgattgaaacaaaagtgattctttgtgttgcaaacctgaagtttacagaagcaacctgatctataaaaagtggtagttataagaatgagtaataataaatagaagtggtataaacaatgataatgaaagccgtgtattgtgatagatagctctaatcccagcatttgggagattaaggccaggagattgtgcattcaagcctagcctagggtaagactctctctctctctctctctctctctctctctctcacatacacacacacacacacacacacacacacacacacacacacacacattcaactgcagcatagaatatttatatgttaggaacagtatgaaaagcttatttttgtcattgagtccttatagtggcctgtgatattaatgacatctctttaaagttctggaacagaaactgatccctacacttgtggattcaacaaccacatgtctcttgaccacacaagagagtctcccatttaatgtcagagacagtacccatatccctgccgagggattcacattatacccaatgtttttctcagtgtagtccaatcagttcactttgcattgttataacaaaatatcgggctaggaaccttattaactttaaaaggggaggttaattaacttatatttctagaggttagagcaagatcatggcactgacatgagggcctcaccaaggatggaatcacaatagtttgaacatatacagaagaatactcatagcaagaaaagaagtaagaggttggggaaaggccaggcttcatcctttgcaataacctattctcacaagaattaatctagctctttgagacctgaatcaaccccttccaaggtggggtcacttcgcccctaacagcttggttctaaaaacctgtttgggggtaacttgggaatgaagaaatgacaaacataaacacagaaaagctgcggttgggtagggctgtgctggctctgatggagagcatctaccgtgctgcctggagagtaggcttttatcagatacagcacaagaaggagggggtagtaggaagtctctgtaggggactagtcttcgactgttgtcatctaggaggaagaagctgtgactgcgagtttttgcacacactggtctgttgttcatatactcacactcaggccaggggaaggctttgtcatgtctttgagcctcatctgaggaaggctttgtaattttgatgggtctgaggcatggtggttcttgacatagtcatgcccatgtcaacaacacacgttcattcacttgggacttcatctgatcagcattccccacccaccatcacattgaaccttttgtttttgagataggatttttttttttttttttttttttttttttttttttggtttttggagacagggtttctctgtggctttggaggctgtcctggaactagctcttgtagaccaggctggtctcgaactcacagagatccgcctgtctctgcctcctgagtgctgggattaaaggcgtgcgccaccaacgcccggctttgagatgggattttatgtagcccaaagcggttctcaaacttactctgtagccaagtggacctaacttttctgatccttctacctctctgtcctaatgttggaattataggtcagcaccaccacatctgattttatgcagagctgggaactgaatccctggttgtgtgcatgcattgtagcaactaaactatatccccagctccaataccattatactggaagccaagcttgtaaaaacatatgcctttggaggattcattcgagctgtctacaaactgttactgtagctaaggattttcccagtttaaggaaggaaagaaaggagatgagggcggggaagaaaggggatctgcaatcctcccatccctacccccatgtggttaccaagagaagatgacatttcagatttcagaggtctccaggcaaccagaatctggggaatcttcttgcacaccatggctgcattgatatgccccactagaacacttccccacagtgaggacctgggttccaggcaggaccctgtctcctgtcagttgtgcaaccttaggccaggcagtcagtcacttcacctctctgacctcagcttcctcatctgaggagaggactctgtctacagcactggggcctgccagccttctcagcaggggtgttgtcagtttcagtcataaggtatcaacggctttatgtaagctctctggcactgtggccagcaccacactcatggagtgacaaggacctcaagaatgttctagttcatcaccaggaagcatatggtattttctagtagtgaacttgctacagcaatcctttacttcctcctctggcctctgtggcaccccagattccctctagttgaggaagcattctgcatccacgagtggcaaagggacttacttggccctcagagcaatggaacccgtgaccatgtgtcatcccactatcctcatagccctgttggtcctggatgccctgccttatgtcctgggttctgtgccagggcataaatcctcaaccccagaaagactggcctattctctgtatctcccatgtgggagcagaaagagctggtcttaattaggtgaagatgggaaaacccaacctctgaggcaagcaaaaggaaggaattaagaatatggtcagactttcaaagtaacaattctggaagcttccggtgcactggtattctgtacctaagtctcatgtctctcccctctaccatcctgttctgagccccacaggtcaagatggctgtgggtgtgagccaccatgctcagcttctgtttaggcttaaaaaacagacaaaacccccagaaaaaaacaactgatcattaataaaactgcacatttagaaatatatttattttaggttatgtgtatacatatgtctgtgtttgtatctgtgtccaggcaggtatccatggggtccagaagatgggatctgggaactgaactcatgtcttatgtaagagtagtagatctaccgggcggtggtggcgcacgcctttattcccagcactcgggaggcagaggcaggaggatctctgtgagttggaggccagcctggtctccagagtgagtgccaggataggctccaaagctacacagagaaacgctgtctcaaaaaaccaaaccaaaaaaatgtgtaagagtagtagttcattcttcctttctttctatttaaggatttatttatttttaaattatgtgtctgtgtggtcatggggagcaggatatgtgtacatgagtgcaggtgcctgaagaggccagaagaggaagatggatcccttggagctgaagttataggtgattgtgaactgtttgatgtaggaaccaaacctgggtcctctgtaagagtagtatgtgctcctaaccactgagccttttccttagccctatagaacaaggttataaccttaaccactgaacattctctccaacccctaagatttcacatttttatcgcacaaatgttacttcctgtttctacctgaaattttctattcttcatcttcagtggtggtgcatgcctttattcccagcactttgaagacagaggcaggaagatcttgtgagttggaagccagcctggtctacataatgaggtctaggacagtcaggactacacagagacgtcctggacagaaaaacaaacagggctggagagaaggttcagaggttgacagcattgactgactgctctcccagaggacctgggttcaattccagtgcccacaactgtttgtaactccaagatctgacagcctcacacagacatacatgcaggcaaatcaccaatgcacataaaataaataattaaaaaagaaagacaaacaaataaacaaattatatgagttaaagtctaaccaggtctacaaaacaagttctaggacagcctgggctacacagagaaaccctgtctcagaaaacaaaacaaacaaaatcccagagctcagacttaggaaaacacatgtccagtgttcctaacatgggtgccatttcctaactggacacagaggggttccttcttcacctaagaacaagctttattgtccagctactttctaatgagcaaagaactcagaagttcttggcctttctatttttttttctgctggtttcttgtggaacatttttttcctccacgtatgtatgttgtataatgtatatcagtgaacatgggtatacgtgggtgtgtgtacatgtgatgtgttcgtgtatgggtgtgttatgtaatgtgtataactgaacataggtacatgtgggtgtatgtacatgtggtatgtgtatgtgtgtgtgtatatgtgcgtgtgtgcatgtgcatgcgtgcgtgcgtgcgtgcgtgcgtgtgtgtgtgtgtgtgtgtgtgtgtgtgtgtgtgatgacatacatgtggaggtcagagcacaaaccctgctatgggttttgatttccatcttctcagagacaggatctgtattttggttgctgctgtgctgtgtacatcaggctttctggctcatgagcctccagggatttccctgtgtctacctcccatctaaagataaagcaccaggattacatgctactctgcctgtcttaacatggcttctgcagacagaaactcaggtcctcaagattgctcagaaagcacttccaccagcctgtgatcttgaatttcttccttccttccttccttctttctttccttccttccttccttccttcctttctttggttttttaagacagggtttctctatgtagctttggatcctatcctggcactcgctctgtagaccaggctggcctcaaactcgcagagatctgcctgcctctgcctcccaagtgctgggattaaaagtgtgtgccaccaatgcccatcgatcttgaatttcctttcttaacttgtttttcttttatgtgtataagtgtttcactcgaatgcttgtaagtgcactttacgcatgagtcacattccctgaatctggagttatcgatgccaccatgtgggtgctgggaatcaaacccaggtcccctacaagagcaagcactcttaaccactgagccatctccccagccacattctgagcttctgatccccatgcctcccccctggaatgccagaattacaggcctgcatacccacgacatgttcatctgcagcttgatttttgctttttacatttctttcactaccctttcctctttcacctgggaaggttccagtgagcaccccagacttggatgttcaccaacggatggagctggggaagaacctggaacaaaacccatgaatctgccatgttgtggtcatctgtcagctgtggtcattttgtaattatgtaagtaccagtcagactacaaggcttaaaaacccaccccacagtggctgggctcagtggatttgcaggtgataggacctaaaggttgaagttgaaaactgctaattaagtgtggaccagccctaaataaaatcagttctgaatcaaccatggtaagccaagctcccaggtctgtcattaacacccgcgtcattgtgtcattcactttctgcacagctgagggcttgctctccactcttttgtatctgttcatgtggacaccagcaccctgcaaactgttgctggccagagcaagacctaagggaatgtgaaaaacatatacgcttggcagcaggtgggccacccattcagaggaacgttcatagcaattcgtgagagaggattcttgtcctatagctgtcagaacaaattaccacaaaccggggaaagggacttaaaacaattcttgcactttgggaggagggtctaaagtcaagatgtgatggagtcctgcagcctttgaaggctttaggggagatcaggcctagctcataggatcaggtggctgctgttattcttggcatcctgtggcttgccctcctcccctctccctccccctgtccttccttccactctcttcatcacttctccattcttgtctccttgtcccttcccctcttttctctttttatttgtcttaaaaattatatttatttacttgtctgttatgtgtgtgcacaccatggaggtcggaggacatgggagtctgttattccccctcccccaccatgaactagcctgacagacttagccacaagcacttttacctgccgaatacatcactggccttttttattttgttgaggcagggtcttgctatgtatctttggccatcctagtacctgatgtgcagcctaggctgccctcaaattcatggcgatcctcttgactcagctttcaaaccctggggttcattttttttttagagagagtctcactgtgtagcccaggctgcccttgaacagacagagatccacctgcttctgcctcccaagtgctgggatttcagacatgagccaccataactggctaagatgaggactttgattctttcccacccactcagtaatacttgctgtgtcccttcttgtgtcatgtctgctctaggagcagagagcacaacagtgcaggctgattttcatggcgtgtctgtgataaggagaacagatggacagaacagacaagaccatatcaaggaacgacaagagctggaaagaaaacacagcaaagatgtgacggcaaggctgagtggcaagttcgcactttcaaaggagaggtctttctggggaggtgacatttagaccgaggtatgactgcaaggaaagaggcagctatacaaccaggagacagcaagagccaggccccctcaatgtgggggtgaatttatcaggttccaaggccacaaaggtggcagcaatggctggaccatgatgagcaagcaaggagcacctggcgagcctcctgcagaaccaggagctgtgggaggaggcacaatgtttattccaagagccagggtctcagctatgtgcttaaaagcccactatggggttacagacatagctcagctgctagagcactcaccaggcatgcagagcctggtttgatccctagtattgcataaactggacatagcgcatttgtgtgattccagcactctggaggctgagggaggaggactagaagttcacaaccattctcagctacataagaattcaagactagcccaggctacatgagaccgtgttttaaataaataaataaataaataaataaataaataaagaccctcctttattactggggagcagtgggccagggaagggaagattggaggtggaatgcattcggaggatattgctgctgttgttagacccccgaaaactcggggtcctaggccaggtttgcagtcaccccaatcaccaggcggattcgagagcttgctgcaaactgcacgaggctttattgtaatttaacgagttaaccccatgttagctcgggtctttcacccacccgccatggcggacggctagaaaagaaggctcctacgggctcccaaaagatcttatagggcagcgtaaggggagtgtctaggggtacgcacaggcttacgcacaggctcacgattggtgtgcctccaggcttggagggcttgccctgtgttgattggtcaactggttgttatggctcataggccctcccagggtggttgctatgctctctacgtcattgctgtgcgcttgtccgtaaagcacacctaaggtcgtaaagcatagcgccaccagctaacctctgattggttccttgtcacaagacaggcatctgacctctaagtgactaaggttccttgtcatgagacaggcatcgacctctaagtgaccaaggcaggtttatggcaagcacgtgttcggctgttatggctgccaaaagggaagccggttccttcactgtaagcaagactgggggtggtagctgggaccagggcacgatgtggagatggagagaatggatttgaacattttccagaggtatcagagacaactcccccaccctgtagactgtctatggagcgaacaaaggaggcagtggtaatggatctagactttctaagtaactgagtttccatcctacttcctcatctgatttatatttaaacctcattctgtaaagcccgaactgtcctggactcactatgtaatccatactagcctaaagctcatggcaatcctcctgcctctgcttctcaagtactggattacaggcatgtcaccagtcccacattctacctttgttttacctgtggcaaaatggattgttgacgaaaaatacttctcttatttcgaggagaataaaagcttattcttgaggcaaatataagtgggaacacagatgtatgttgccccaaacagcatgttccaatgtttttatagatacagataaaaagaaagtcatataaatcaaggcatgttttcaaatactttgatggcgacatcaggccactgggttaaaaagaagttgggaaaatgtctactgcaggtctcttgctgtctgatggaatttttagtttgggggttatcgagagctagtgatttgataagttaatgcatctcaaagtgtttcccatgatagttacaaggatattgggtcaaacacagaagtggacaatgcttatagggttaaagatagcctagtgtaatttggctgtggacctgcaacaatgcaactctccacagtcaggaagttccaagctgtcaatcagctttgcagagtctctaacacaggagagccttcccctccccactaacattagttagcatcaatcattttaaccatttcccagtgcacccatctccgctccagtcccaggactaacagttttgttatctgggtttgtcagcggaacaatctgtacgttccttagagtctgttgaaagcagagtgtggaaagtgcctggagggaggtcagagccacaggcctggccccttcttccagctgttcctgatggcgaggggaggggggcggatttcgggaatccgggatgtgtagtggatttttcttctgcttctgcctctgcagagggtggggaaacccttcctgttgctcgtgaataatctcttgaccttgctgaggacggatgctctaatgctctgtccttctcaggaggctcttaagtggagttcaggtaatactcctccggacactacctgaaacgttgaaccctgtggttcagggcagatcatcaattatggaaaggtccgctgaaagctaacagagctcctgacttgcccatctgaaacccgagaagggtgaagacccacactgggaagctgcgcacagtgggaagcagggcatggctcaccaagagaccctggcttctaacaactgctttaaatttaaaagctgagctcaagccaggcgttgggtggcacatgcctttaatctcagcacccaggaagcagaggcaggcggatctctgtgagtttgaggccagcctggtctacagagtgaatgccaggataggctccaaagctacacagaaaaaaacaaaacaaacaaaaaacaaacaaaaagctgagctcaattaatcgaccataatattcttttattttaaaattacctttatttatttacttatttatttgagacaagatcacactatgtagctctggctgtcctggaacttgcaatgtagacgaggctggttttggatttacagagatccacgtgcttctgcctcctgagtgctgggattaaaggcgtgtgctaccacacccagctttttaaaccaattttcaacatcattctgaaattatattctatgttaaactcataataatactgctaatagtactttacatttttaggatttttaaaatcttttcttttgtagttccaagtgtggtgatgtattttctgaaaatccctcttgccttcaaagggactgaactttccgcctgactctgcaggcaacctgcggctttcctgtttactcggcagggtaagcttaacttgcctttaagagaacaatgtaaccaaacttagtatgccttagatttcccctgcagtcattgtttacagcataagtcaaagtataactctaattttaagatatgtacttttgagtacatatgtgcatgttgtggtaatcatttgctcacagcagccaacaggttgaaagaaaccttaaacaaaacaataccccggattgataacatctgtttgtagttagtgcaaacggttctgggtcagttaagtaactctgtcctttgtaatttctgttaaagatctctttaaagaagatccctctcttctcttaccccatgctctctgtggagttcaaaactataaagctaagctcttttttaccgtcaggcagaagacacagggaggaagtggagattctaatttggctgatctttaagtttcaaaccctggtcaaacaaatggctaactgaggtgcctatttaacatcaaagtggacctggccaccaagttctcccagcatcccttcgtccctatctgttacagacaatggctggcattcccagcctcctaccctgaactcttctgctcagaagcagggtccacttgtatatgttaaataggcacctcagcctttgtccccaagtttgagacctaacatcattcttatcaagctgctacaggaagtctttttcattctttaatatattactgacatatcctgtgtattctttaatatattactgacataccctaagcaaacctgtaagcctcacctgcccaaggaccaggtaacttctgggattctgggagttgtagttcttgaaaaatagcaacaaagcctcatgggaaagtaggtggcctatgggttttgtccttaaaagccctgacaacacatgtctcaggggccactcaactgggatatttccaggaagtggttctgactaaagtccatcttggtcagtatttaatattttaacaaagcttgcttcaagtttggccccaaatggtggaactgttttttctccagtgaatctcaggattaacaatccaagtagatgtaattttatgtgatgaaaaggaaaaatgtttcaaatataaaattttgacgatataaacaatataatgattaatctcaaaggtgagaaagttttcctaagtaagagttagggcagtggttctcaacctgaggctcatgaccactttgggatcatatatcatattaacattatgattcccataacagcaaaattacagttatgatgaggccatgaaataattttatggttgggggggtcaccacaatatgaggaactgtttattattatattaaaggggtgcagcattaggaaggttgagaaccactgagttagggaatagcaatgaacactgaggaggaagtgacttcagggtcctgtctccgtggtgacttaaatgacaaatgctccccaatagtctcagccatttaaacacttggtccccagggtggcactgtttgggaagatttaggaggtgtggccttgctggagaaagtatgttattgagggcaggctgcttcatgttttctgctctggacattttgcagaagttcaaaatcatgctttgccacatagggagtttgaggtcaacctgggctggagacccagtgccaaaaaaatacaaataaacaaaccgacaaacaaagccaaaccaatgtgtatcacaaagtccctgagctggcaattcatgaagctttgaaaatctgagtttccatggtaaccccctgggtgctagaaattccagacctgtgggatatctgccaagaaaacccacaggcattgagcaaaattggcccagtaaagaggccccactagctccctcttgcatcagtgacaatactgttgagagtggtcttgtaggcagagatggagagctcgcaaattcaaggccagcttggactacacagcaagactctgtctcaaaagaaagtgacagtatctttagcataaaacccccagtttttacataggagaaatgaggacttctactctaaatgaggcaaatgtggccttgaattcaggatgtgctgcctgggtcttcttgatgtgcacacctctgtgtggctgctcttggccactaagttcgagtattgggcgaaagcctggagatttggatgaaccacaagactcctggtccttttctgagagaatgtctctcccctttattgtggagcagccttatatacaaacttacaaaaaccccaggtcaaagggttcacaacaggatattgatcccagtggggtgagatcaggcaaacaggaggtacctgtggttatgctggaaaacaactcttagagaccccatgggggctgggtgccaacacctctggtttcatgagtcttttgtaactagctggactcgtgaaaggcagattttagtagccatcttatttcacactctattccctcctttttcctgtttgaataatgttcagtacttaggagctttgggcagagagctggcttccttttcccgcctctccattttggttctgtcatattggaagctacagggattatccctctctgccagaagtcagacaggactattcctggtagagtccttttctctttctcttgtttgatctttctccttttatgcagctggattcatttgtgctttcttataccacgagctgtttagggtgcagcttgacctgcacacggaagtcttttctgggccttttcccaatggctcccaagccacttcctcatttctctttttcttgtggcaatgcaactgacatctgcagtgttcacagggtaacttagtatattttgtagacaagtgacaacctcaaactgccttccctctgctctcaactttcctgtctcaatggccctggagctgactcaacacaggaaagggccactttctccaggacagggtttatatggccccaagctgggaccatctgagtgtttttaccataagccctaccccgagtatgtctacagaattattcactgctatgtgggtgtcatctgctcatttacaagcagaaggaaaagcagtaaaataaaaagaactccaaccacaaactattctagaataaacagctcaaccaaaaacaaaacaaaacaaaaacacttgagtgctttagtttttcaaatatttttctgtgtgtgtgtgtgtgtgtgtgtgtgtgtgtgtgtgtatacttatgaatgttagagaataacttgtgagatctctctccctctctcttgtttcggtttttggttttcgagacagggtttctctgtgtagccctgactgtcttggaactctctttgtagaccaggctggcctcaaactcacagagatctacctgcctctgcctgaggagttctgggactaaaggtgtgtgccaccactacctgttgagagctggttctcttaactggctttattaccatggtagtctgtaacattctctcatggaatatgtcacctccaacatacaatggtacagagtaagaaccctctaaaaggaggatggggaggctggcaagggaaacctgggccaaagcaaagttgaactcagcaggggaaacagtgacccctgcagctattgcctggtttttaaagcagatgtttgcaggccataagtttcagtggagttagatagccatacctccatgggcctaccctctgcagtttatatggctcctctctagggtcaattccatcgaatgcctattggtcttttgggcagctagctcacactcctagcacttctagcatccagaggttaccaccgcaactttggttttgtcttcaaggtggtaggggtggcggtcctacgtgggtacacaagttaactcaaggatacattttattttactttttaaaaattacttacttatgtgtatgggtattttgtatgcatggatgcctgggcactgcttacttgccaggctcctgcagaggctggaagaaggcgtcagatctgctgcaactggagtacagaccagtgagtggccatgtgagtgctgggaactgaacaggagtcctctggaaggtcatctagtgccctcaaccactgagctacttctctaatgctccccccccaaacaaaacaaaacaaaacaaaaaaacacaaaaaaaacccaaaaaacaaaaaaacaaaaaaaaaactacacagatttgcttgttttcttgtctgaggccaggccataaacttgtggcaggcaaggtcaggttttggaaatttgggagtaggatataggaacatgttagactataccaggttttcctaagggaatgtgaaatttccagtttccgaatccactacaggagactgctagtaagaaaagctttttaaaaaattctaattgtccctggatgggctttaaccaccagccttcctgttaacagccgaatgcactaaccaattgcaccacagagacagtaagaaaatgtcttcttgtctacattcaagtacatctgagaccaagcaagtgcagcctagctatggagggcttttgaagtaaaattttgtgtctgataggaagttaggcctccactccaacaatggtttgattatcaactaggggtacgctagcctaggacactgaattcaatccctatcactacaaacaagacaaaaacccagagtgaagcaaggaaaccagccactccattcccaagagaacctcagcagctggcattatcctctgctgcccccaagtggaagttcaagcaactgtattaactgtatttaccatctatgaaggatcaaagatattctgtctgtctgtctgtctgtctctctcttttcccctctccctccatctcaatctctcactccctccgtccctctctctgtctcctcccgccttccctcccttccttttttttttcttcgagataggctttctatgtgtacccctggctgtcctggaactctctttgtagatcaggataacatccaactcagagcttgcctgcctctgcctcctaagtgctgggattaaaggtgtgagccaccacttcctggtttctgtactggtttctattgccttctgaaagtactcctactattactactactactaacacacacacacacacacacacacacacacacacacacacacacacacgactagcatatcaaagagaaagggacaaggtatcaggggttccaatacatgaacaatatttgagatgttcagcctatttgtgaacatatataaaggccagcaattttgtaattgatatgatgtttttcttttgggggccagggatttggttgcccaggttggtctccactcaccctgcagcagagggcgatcctgaacttctagtctcttgccttcctcttctgagtgctgatattgtaagcatttgccatcatgcccagttttattagtatttttgaaatgtcttaaatattatttttagatcttaaaaatatataaactagctcttcaatatcatccctccaaaacactaaaactatttctcctttgccttggaagtaaaaataaaattcaggatagtagtgttttagacctgtgtgataatactagtgcaacctatgtgtgtattcattaatgtgtatagtagtgtgtgttttgatttaagaatgacattccatgggatcattgtagagctcttgtgcatgggtgtgcttgggattgaacctagacgtcactatatcaaagagctatgcacctccagtagctatggtgtcttttttaaaattttcagcataaatgccataatttagtcctttgtatttaaaaaatcactcttagtaacaaaaagaagaaatctatcatttgggtaaaaaaagaaaataagcttgataacatgggggcaggtggtacatggatgtaaccccagcacttgggaggtagagataggatcaggagttcaaagtcacccttgactgtaaaacaagtttgaggccaacctgggaaacatgggactctatcttcattatttatttatttacttatttatttattggtttttcgagacagggtttctctgtgtagctttggagcctatcctggcactccctctggagaccagggtggccttgaactcacagagatcctcctgcctccccccccccccagtgctgggattaaaggcgtgtgccaccaacgcctggctgggactctatatgtggatataagggctggtaaggtggcacagtgagcaaagggcttgctgtctaggcaggaggactagagtttggttgcccagcaaccatataaatgccaggtagtgtgatgccccctgttatcccagctcttgagaggcagagatagggagtccctggagcaagcaggttacagtggctgaatctgtgagctctgtgtctaagtgagagatgctgtctcaatacatatggtggagaacggttaaggaagacaactgtcaacttctggcttccaatgcacacacacaagtacatgtgcttctgaacacagatgtatgtatgccctgatgtgttcaaacatgcatgtatgtatgcactcacaacacaaacaaatatatatgcaaaagagggtgaataaagtgctccctgaaggcacaggttaggttatcgcatgaaaattatggtgctggggtaggctacctcccttcacactgctggtcacagagactcctgggacccttcccccaacagcaaacagcaacagctgtcggttgttcatgatattgccgaagacatcatatataatggaggatgtagagaaaccaagctggaattggactagaatactgaccagccaggtaagacgagcccactgatgcaacagtcgcaagcctgttgtggactgtcgaggactggtgtttatggggctgcagttgggaccagtggaacagccccttagtggcggagtgtgattgagggaaggctagctatagacattaaaggaaagatggagacataggatagtgtcaggagggcagtttcagtccacactgaatgcgcccagtttattcatgcttcatcttaagtaaccaaccaaaggtgaggacaatggtaaaagacttctattatcatgtataaaggacaaatagcaattacttcccttaatcctaaagacactcttcaggtacaatatatctgaactatcacctagccttcagggagagtgtaaattctctctgggcctagggctattgttatttagatgggagccattcaccatggaggccagggcatcctgcagccagtaaactaacatctcaaagacaataggaattgaggcaggatggaatagatttccaatatatgggcccacctggttaaaaagtacatggccgaggtggccaaaggccctagtggggatgctgctttggttactttgctgaacagacatgatgtgcccagcaaaataccttttgaacaactgttaatgcccataggatcttctgttgccgggtttagtcagagaacttttttttttttttttttttcagtggtcagtggtgactgcagagactcgtgatcatcaaagtactgaaagtgagtccagaaaatgttttggaagaagaggaagattgcaggtctgagaatgggatgggagagatgtgtgagttgctggcttccaaaatccctcaagagttttctttctctctttcttctctctctctctctctctctctctctctctctctctctctctctctctctcataaatgctcagctgtcaagtaccagtacccacatggtgtctcacaaccatctataatgagatctggtgccctcttctggtgtgcaggaacagtgtgtacaaaaaaaaaaaaaaaaaaaaaaaaaaaaagccaggcattggtggggcacctctttaatcccgtcactcaggaggcagaggcaggcagatctctgtgagtttgaggccagcctggtctacaagagctagttccaagacagccaccaaagccacagagaaaccctatctagaaaaaaaaatgctcagctgatagcttaggcttgttactaattagctcttacaacttaagttaacccatatttcttatctaagttctaccacatggctcatggcttttacctcattttctacacatcctgcttcctctgtatctatcttgtgactctgagactctgctctttttcttcccagcattctctctgccccccaaatcctgcctagttattggccagtctgctttttattaacaatgacagcaacacatatttacagtgtacagagatcgtgccacagcaatggatgtcctttaagtaaaaacagaattatcatatggcccaggtatgacactccttttttaaaagtctttttaaaattaatttactttttacattccaatcccagttctccctccctccctcttttcctgcttcccccactctcccccatctcccatctgctcctctgagagggtaaggcctcccctaggaagtctactaaatctatcctatcatctcgctgaggcaggaccaaggctccttcccacccccacacccctgtgtctaggctgagcaaggtatctctccatatagaatgggctccactaagtcagcctgtgcattagagtgagatctaggacccactgccagtggcctcatatagtgctccagccgcaccattgtcacctatattaagggagtctagtttggtcttatgcaggctccccatttgtcagacctgagtcagtgatctctcactagctcgggtcagctgcttctgtgggtttccgcatcatggtcttaactcctttgttcacattgtcgctcctccgtcacttgattgtagtccaggagcttggcccaatggttagttgtggatttctgcgtctgcttccatctgtttctggaagagggttctagcttctctggggttgtggattgtaggttggatatcttttgctgtatgtctggtatccacttatgagtgagtacaactatatttgtctttctgggtctgggttaccttactcaggatgtttttttctagttctgtccatttgcctgtgaattttaggatgtcactgtttcttaccgctgagtatactccattatgtaaatgtaccacattttctccgcaaggatttctaacccagagccaaggttctttgggtcatcctgcaggccagaccaaggagacaactgctggccaccgatgtgcattaccagctactctaccaagcagtgacattgttctccacagtgacaactcttttggaagaattccagtcacttcatgtctttggaatcagctgcaggtcctaatcttgttgagtgacaaggaaattgaggctcagagaatttggatgcataaagtcacactgctggtactttctgttccccactgacacgcagcctgtctacctacagacccgactctgtctactccatcccatcagagagcaccgctagaccaggctcctgcaacactggtgcttctgtgccctgccagggtccacattgacttctgtttttattgtacttcattttcctttatttttgagacgagttttcctatgtactagactggccttgggtttgctatggagttgagaatgacattgaacttgtgatcctcctgcctcccttttcatagtgctgagattacaggtgtctactaccatgcacagctttgtaacttatgttcagaatcctggagtcagccactcccttaggtctggattcctaaaacacatggaaacatcagaatccagttacggagaagctccagtgtcccacagagtggcaggatgactaaagttaataagaaataactgcagatattcaaaatattgagaagagaacatttgaatatctctctctctctctatctctctatctatctatctctcgtggggtggtgaaggtggggattatcctaatctggtcgttacacattgcatacaaatatgtagataccacattgtaaaattatcagaatgggggaagggatgctgaagagatgactcagaggttaagagtactggctgctcttccagaggtcctgggttggattcccagcaccacaattttgtaaccttcttatggcctctatgcacatatgtagtgcacagatagacatgaaggcaaaatacccatgcacagttttttaaaaaaaatcaaaatgtggagttgcatgtagcaagtggtttatgcctgtaatcctaacactcaggagcagaaggagcagaagtttaacgctatacagtgaaccctgtctaaaaacaaaaccaaaccccaaattatcaaaatgtagatacagcatttttagaaaatttcctgctctacaaaattgtaaggggtttgccttagattccattgagataatgaatttcatgaaatttaatgtactcctattccgatgagggttttgaatgatactacagggttactagccagctcatttgcatgttagaaccaacacagggcagcagaagactcccttgtgaacatcaagagcagacgttcagattctcaagcctgaaggaaccacagaaacctcctcttactacattgctaagataatgtccatttctgggcacttactgaattttcatgtgacttgaagctagctacttagttctctgaactgcttgctcagttacaaagtgttggtttcaattctgcagctgtggaaacctgtagggaacaagtcagtgattatcaaattgaccttattagggtaaccaggggaatccaagaatgagtctgggaacattctgtcggaggtaacaaccaggacactcacttttccttattgcttcagaccaatggttctcaacctagaggttgtgacccttcgaggtccaacgacctgttcacaggggtcgcatagtgacctgtcccgagggtcagtcattcagggttccgaaggggggctgcctgaaagagtcatgggcgagagaaggaaggagaccaaacgcgcaaaagaggggaccagagtccatctgtgcaattgtcaaggtctcgatttattggggctcagagtgggcttatatagccctgcaacaaggaaattaggcaaggggggggcggaggaggggatagaaggaaggaacatctggtatttgctgggactgggacattcttgcggtatcttcgaaacagcaggcagaaaggcccacgccttttctcggaacacagtcgttagcagtcccgcttggccaaacttatctaattatgggtcacatgaggctcacagggttgtctttaagccacaaactttaaaggtcataaaaagcttacaaaaagtgggctttaaacaccatagtttagggcccatggcccttaacatcatagcagctatcctgcatagcagatattaacattatgattcataacataatagtaacaaaattacagctatgaaatagcaacaaaaataacacaacatgaactgttttaaagggtggaagcattaggaaggctgagaaccactgctctacttaggaggctttattgtaaagcagctttgttgcagtcgggcaagccaagtgtggttctctatccctccctgctaaagggcttcgggtccgaaggcagagagttactgccccctagtggacgcagagcaaggaggtcgactctcaattcagaaattaaaatttgatttccctggagttgaatttgtcttgtgaggatcttctgaagccatctgccatacattccagctctatcatttggagatggagacactgacaccctccctgcccccagccacacacggcagcgtccattccactacctcacgctgcactccatagacagcacttgacatgctccagccaaaccacagacgtctgcactgtctcttgtcaggtcaagaaagtgcagacattcaggaaatatcttttttccatggtgaatatttcaaactaagagcaccagggttgaggggcttcatattcagggaaagacgttttctgacatttccttatctggccaaacagatcctccatatgtcccaggggaggaaactgaagtctattactgaatttccgatctaacttaattcctgacagcctggctctctctatttcttgctgtcccctctccttccttccacctcagtgtgtgtggctgtgtctatgtgtgcacgccacgtggttgtctatgtgtttgcatgccacatgtatgtgagtgccctcagaggccagatcccctggagctgcggtggctggtgtttgtgagccacctaatgtgggtgctgggaactgaattccatgttcttaactgctaacccacggtctctagctctatccctctttagttttttgggacaggacctctcactgatcctacattgtctggctggccagggagcccaggagaacccccatcctaccccacccccagcttctgtcacagatgcacactgatgggaatgacatttacatagttgctgaggtcttcgtgaatgtacaacaagcactttagccactgagccatctcaccagctccctatttatttatacttaagacagagtctcacataccataggctggcttcgaactttctatgtagccagggaggaccttaaactccttcctccacctcctgagcattgggatctcagatgtgcaccatcatggctggttcaatatgatgctggaggcagaagccagggtgtggtgcattctagacaaacattctatcagctgagcaaacacaccctgaaatcatactcatataattcatttactggggctggaaagatggctcaggagacaagagcgtgtacagctatatgcagaggaactgaatttggttcctagtacccacgctggagctcacaaccaccttaattaaccccagagttaggggagccaatgccctcttctggactccagggcatctccactcaagtgaacatacctttacatgttatacaaaattaaaataatgaaaacaaatctttaaattttatttattacctgtagaatcgtataggtgttgggatgcaccatgtaaaactaccggcatttaacttttggtcttgtgtcaaaaaagaagataccaaagggagatttcaccagagttaatcagaccattcaaggctaccctgacaataggagagagactaaaatgagtctgatctcaaccctgaaatctggaaggcaggcagggttttaagtgcctgggcgagctagtggagaggttctgggggtgttaggtgggagaccggtgtgtgggaagcatgaatcacagtaagttattcctgagtctgaagagcttttctccagggtgaggccatctgggtttgcaaactggtacttaccaaagttagtgcctgtgcttctcaaagcctgggagagatttagttttttaaatgatttgtgtgtgtgtgtgtgtgtgtgtgtgtgtgtgtgtgtgtgttgcacaaaactgcttccacagtggaatatgccattcggggtaaactaaatctaagaatatactcatattccctcaaaattactttttgattttgattgacacatagtagttgtacatattgtggattgcagggtagtgtttgaacacaaatatactacatatagtgatcaaatcagggacacagaattcctataattcagacaattacttcatgctggtgatgttcaaaatcctctatttagattttgtttttggcacagagtttcactgtatagtcaagagtggtataaacttgccatgtggaccaggctggccttgaacttatgcctatcttcctacctctggtactaaaggcatgtgctaccacatcagagtttttatcatgaaggaatgctgaatcatatcaaattatttttctgtgtctattgaggaagtcacatgaatttggttcttcactctgcttgctgtttatgatggttggaataggaatgcccccccatagactcatgtgtttgaatgcttggcccataaggagtagcacttaggagatgtggccttgttagggtaggtgtggccttgttggaggagggctgtgaggtctcatacacccagtgagacacacacagtctcctcctgttgtctgtctgtggatccagatgtagaactcccctccatttctatgtctactacatgttgccatgattctcatcatgaagacagtggggtaaacctctgaaactgtaagtcagctccaactaaatgtttttctttacaagagttgtcatggtcaaggtgtctcttctcagcaacaaaaccctaactatgacactacattaatgcatgtatgtatgttgagccatcttgcatccttgtgccaaattccagccatagagtgcagtctgtttgatttgttgttggattcagtttgttagtagtgattgaggatttttgcatctgtgctcatgagggatattggtttgtaggtgtgtgtgtgtgtgtgtgtgtgtgtgtgtgtgtgtgtgtgtgagtgtgtgtgtatgtgtgagtgtgtgtgtgagtgtgtgtgtgtgtgtgtgtgtgtgtgtgtgtgtgtgtgtgtgagtgtgtgtgtgtgtgtgagtgtgtgagtgtgtgtgtgtgagagtgtgtgtgtgtggtgtgtgtgtgtatgtgtggtatgtgtgtgtgtgtgtgagtgtgtatgtgtgtgtgtgtgagtgtgtgagagtgtgtgtgtgtgtgtgagagggtgtgtgtgtgtggtgtgtgtgtgtgtgtgtggtgtgtgtgtatgtgtggtgtgtgtgtgagtgtgtgtggtgtgtgtgtgtgtgtgtgagtgtgtgtgtgtgagtgtgtgtgtgtgtgtgtgtatgtgtgtgtgtgtgtgtgagtgtgtgtgtgtgtgtgtgtgagtgtgtgtgtgtgtgtgtgtgtgtgtgtgtgtgtgtgtgtgtgtgtgagtgtgagtgtgtgtgttattgacctatcatgcccagaagatactgtttcacagcagtctcaccacaccacaacctctggctcttttttttgaggggggtggtttgagacagggtttctctgtggctttggagtctgttttggaactagctcttgtagaccaggctgctcttgaactcacagaaatctgcctgcctctgcttcccgagtgctgggattgaaggcatgggcctccacggcctgacccaacctctggctcttactacccctcttccacatgttcctgagccctattggtaaggtctgtgatacagatgtcctgcttatggccacatatcactctgacacctatcttttgcattctggacagttgtgaatttctatattaactgctgtccactgaaaaaataagcttctctgataagggctgaaagctaaactaatctgtgactatgaaaataaatagggacagtttaacactatgctcatggggtcttagctagatttatagttctaggtgcaggttccgtcctgtgaagcagctctccagcccaatcagaaagcatttggttacctagatcatccatggtactattgtaccaatgggccagtctggtcactactgcagcctgcagacttgacagctgggtaagactattcacttctccccagcagtctgcacagcacccctggagctatggaagctgccaccagggaggaagaagcctccagctcagtgccagcttcatttctctttgtcctgtgaccaaagtatgtgatatttttttagcaggaggtctttagaaaaagatagatttaattttttaattgcatgtatatgagggtctgtatgtggaaatgtacattgtaagtgcaggtgcctatggcatccagaaggggacgttggatcccctgaaactgtgtttacaaatgattgtgagttgtcaacatggtctctgggaagcaaacctgggttctttgtaagagcagtaattgctcttaacccctgagccatctctctggccccatcaggagggtcttagcatcaagttctggtgggcaactctgatggctggctcttatcgtcaacttaccacaatctagaatcatctgggaaccgagtctcactgtggaatcctctagattgggttggattgtgggatacttgtcagagaatgttttgatggtgttaactgatgtggaaaggaagactcagtctataattgggaagtgctattctctaggtttgggttccagtttgtataaaggccagaaaatgagctgagcaaatgtaaacatgaatattctgtctctctccctcctctccccctctcttcactctcccctcctttctcctctcccctccacccccttcttggttgtgggtgtgactaactgcttcccattcctgctgcttttgactttgctattctgatggactgtaccttgaaattgtgtgctaaaacaaaccttttctccaataggttattttgctggggtattttaccacagcaacacaaaactgggacaactaagagcaatggcagaagcctgtactattctgaggatccctgggcccagggaccaacaaagggaagaagggtacccacacctggcagtgggacttttgttcaataacccacagtttctagaaggagtatgcccttcaaactcttgttttcttctttagccttatattatttttatacatatgagtgggttgtctgcatatatgcatgtacaccatatgtgtgcctgttgcctgtggccagaagagatctgatcctccagaactgaagttacaggtggttgtgagccaccatgtgggtgctgggattcaaacttgggttctctgcaagagcaggcagtggtcttaacagctaagccatctctccagccccgaaaagtctctttttttttttttttaaaaattatatttctagtaaccttataaaagtttcttaggactctttcaaacagacttcatgttagttatccctccccttgcatttgcctctgtcttaccctctctctctcttcccactttttctttcttgcccctcaaattattctccttttcctcttcatactacatgtgttttactatccaccttcctttagacctttcttcccccaaaccgccaactcctttctagtttcttagatataggtagtttaagttaaatgtaattctctctttcctctccctccttctccctccctcccttcctccctcccccttctctctcccttcctcccctctgtgtatacatgtgtctatgtacatgctcatgcgtctgagctggaaattgaactagagcctcatgggtgttaggaaagcattctaccactaagctgtatttccagcccttctgtggttgttttgtttgtttttgagacagggatggcctcaaactcactacatagtagaggctgcctgtgaatccctgatcctcctgcctccacatcctgagaactagcattccatgtgtgcacctccactcccatttcccacttcacgtggtgctggagatctaaatgtcagaaatgctcctctaatctctaatgtgggagtaaagggaccttccctttcctgccctttctactgttattgttattatcatcttattattgcaagagggcatcacacgagagaaactgaatatccccaaatcaattgtgacttaaagatttatgcattcctttgataagagagaggaaagggaaggagagagagttcagtggtcaggagcgcttgctgttctcccagaggacttgagtttagttccctgcacccatgtcaggtggctcacaactacctataactccagctccaggggatctgatgtcatcttttggcttctgtgagcacctacacacacacacacacacacacacacacacacacacacacacactgaaaaaagataaaaggggggagcatatatacacacatatacgtatgtatttgtgtatgtaacttaggaagtacaaattatggaaatatgacccagctctcacatgaattgctaatagctagtctggaaaactcttgtctcttcctatggcatgttaatgaagagatggggaggggggcagagagcttgtctatggagggtttcatgatacctgggttggatttggagcctggttgtgttgtgttgtgttgtgttctttgtttgtttgggggtcttttgtttttgagacagggttctggaactcactgtgtagaccaggctggcctggaactcacagagatcttcctgcctctgccttctaagtactgggattaaacacttgaaggctgtttttgatcagaagatatttttcagagaaggcctcttttatgcatccatggttcccttaagtttgaagtaatcatcagactaatatagcatacttgggggcttcccaagttaaaaatagagttgattttactgtggtaccctgattcatatctatcctctcttctcatcagatgaaacagagatacagcttaatggcttgctgtgaggacacagcacataggaaggagcccagagcctggacagaatcatcactctactttgtgaattagttactttcgagacctcatataagaatcatacagatattgtctgtttgtgacttagttatattagcaaaatgtcctcaaggttgtcaatgttatagaatgatagaatttacttgtctaaatgttgcatactattccattattaagaaattttgaacttagatgtatttcatttcagaacacaggctacaacatgaagttgtctagttccagggcaacctacactatacagactcttcaaaaatataaataccttactccagtgagggaagcaagtaagctaacggcagatttcatctttcactctgtgtctaccagtccagccagtcccccagtctcatccccagctctgcagcagatcactactcctgcccattctggggggactaagcagatcctggcagaacaccctgccttcctccctcctgtggaccccttagcactccctctcctagtccattcctaagtgtcagcttccaatacctagaaacacagtttacccagaaccccagtggctacaactgtcaggatcccagaagaatttcctaccatgtaacacacagccaacagactctcctaagaaccagacaggtcaacagaaactaaggaataaaacatccactcaacaaagacaagaccagatgtcagcatctagaattattgtcttcccaaacccagatgcctagacaccagcataaagacacagtcaacatcacccaggacattatgtctccactagagtccaacaaccctaccacagtgggacctaagcattgcaatacaactaaagcacaagaaaaagactttaaaatagactttataaatatggtagaggaaattaatatatactttaaagaaaactatgggccgggcattggtggcacacgcctttagtcccagcacttgggaggcagaggaagaggcagaggcagaggcaggcggatctctgtgagtttgagaccagcctggtctacaagagctagttccaggacagtctccaaagtcacagagaaactctgtcttgaaaaaccaaaaccaaaaaaaaaaaaaaaaccaaaaagaaacaaaaacaaaaacaaaccaacaacaaaaaagaaaactttgaaaacacaaacaaatagtggaaggaaatgaataaaacagttcaaaacctgaaagtgaaaatagaatcaataaacaaaactcaaactgagcctaaacgcctttaatcccagcactcaggaggcagaggcaggaggatctctgtgagttcaaggccagcctggtctacagagtgagttccaggacagcctccaaagcaatacagagaaaccctgttcaaaaaacaaaaacaaacaaagaatggccctcataggctcatagctttgaatgcctgttcacctgagagtggaactattttaaaggattaggaggtgtggccttgttggaggaagtctgtcactgggggtgggctttgtgatttcaagggcccaagttagacccagtgattctctctctcttcctgctacttgcagatccagataaagatctctcagctcctccagcaccacatctgctgtcatgttgctacgctccccaccatgatgacaagggactaaacctctgaaactgtaagcatgccctaaaggcacagaaaatattctcaacaagatgcctaccaaagttcaggacgcatacagaataccaaatagattggaccagaaaagaaagtcctcttgacacataataatcaaaacactaagtgtatagaacaaagaaaaatattaacatctgcaatgggaaaatatcaagtaccatataggcagacctattgcaactgacttctcaatggagactctaaaagccaggagggcatggagagatgctctacagactctaagagactaaaaatgccaacccagacttgtatacccagcaaaacttccaatcacaatagatggagaaaataagacattccatgataaaaatcaaattgaagcaatatctatctacaaatccagcctaacagaaggcactagaaggaaaactctaaactaaagaggttaaccacacccaataaaacataaggaataaataaccccagaccagcaaatcaaacgaggaaacacacacacacacacacacacacacacacacacacacacacacacgcacaacaaaataaaaggaatcaacatatactgctcattgatagctctcagtatcagtggtctcaattccccaataaaaagacacagattaacagaatggatgcaaaaacagcatccacccttctgctgcatctaagaaatatatcttcacttcatggatgatattacatcgggataaattgatagaaaaagatattctaaacaaatggacctaacaaacaagctagtatagccattttaatatctgataaaatagacttcaaaccaaaactaatcagaagagatagaaaaggacaccacatactcatcaaaggcaaaattcaccaagaggacattgcaattcttaacatctatgcaccaaacacaagggcacccaagtctgtaaaaagaaaaaaaaaaaaagacttctacagcttaaatcacataatggccttcacacactgatagtgggagacttcaaaaccccactctcactaatggacagatcatccagacaaaactaaacagagaattgctggggctaacttatgtttatgaaccaaatgaaacaaacagatatttacagaacatttcacccaaacgaaaagaatatactgtcttctcagcttctcatagaactttctccaaaactgatcacaaattcagacacaaagcaagtctcaatagatacaagaaaattgaaacaactccctgtatcctagctgaccatcacagattgaagccaaatataaacaacaacagaaaacagaaagcttatcaactcatggaaactcaacaactctctactgaatgaaaaatgggtcaagagagaaattaagaaagactctctagaactgaatgaaaatgaatacagaggatacccagttttgtggaacacaatgaaagctgttctaaggcaagttcaaagcactaagttacctacacaaaacatttggagagatctcatattagtaatttaatagcacacctgaaagcgctagaacaaaaagaagagatcatacccaagaggagtaggcatcaagaaataatcaaactcagggctgaaatcaataaaatagaaacaaacaaacagacaaaagaatcagtgaaacaaggagttgattctttgagaaaaatccgtaagattgacaaaccctttcccaaattaactaaaaggcagagagagagagagtatataattaacaaaatcagaaattaaaaaggggacataacaacagacaccaaggaaatacagaaaatcataagcacatttaaaaacccgtctcaacaaacaaacaacaaacaaaaaaccaacccgtactccaccaaattggaaaatctaaaagaaatgaataattttcttgatatgtaccacttaccacagttatatcaagatcaggcaagtatttaaacagacctataacacctaaaacaaacaaacaaacaaaaaactaaaaaaaaatcccaggaccagaattctaccagactttttgttttgttttgttttgttttagagacagggtttctctgtatagccctggctgtcctggaactagctctgtagacaagtctggcctagaactcagactctatcagactttcaacgaagagttaatgccaatgctcttcaaattactccagaaaatagaaacagaaagactactgccccatttgttttatgaagctacagttactccgatacctacagcacataaagacccaacaaagaaagaaaattacagacagatttcccttataaacatagattaaaaaatttaataaaatacttgcaaaccaaacccaagaacacatcaaaaagaccattcaccatataaaacagagagacaaaagccacacgatcctctcattagatacagaaaagacctttgacaaaatccaacacacttcatgataaaagttctgaagagatcagggacacaagggacacacctcagtataataaaggcagtttacagcaagcccatagtcaacatagtcaacaactacttaaatggaaaaaaaataaagcaatttaggataaggttgtccattgtctccatacctattcaatatagtacttgaagtcttaactagagcaataagacaacttatgttgtaaatagatccataattattaccatgcacaaaactcaagtccaaatcggttaaagatgtcagcataaacccagataaagtggggaatatccttaagctcatggcatagggaaagaccttctgaacagaacacggatagcacaggtactaagatcaacaattaataaatgggacctcatgaaactgagaagcttctgcatggtgaaggacaccatcatttggacaaaatggcagcctacagaatacgaaaagatttataccaactatacatttcatagagggctatatccaaaatacataaagaactaaaaacaaacaaaaacccactggatatcaagaaaacaaataaccaattttttttcagtttatttttcaaacaaccttattttacataccaatcctagttgcctctccctcctatcctcctactccctgccaccatctccccatcccaacccccccatccactcctcagagagggtgaggcctcccatagggaatcatcaaagtctgtcacatcatttagggcaggaccaaggccctccccactgtatctaggctgagcaaggtatccctccatagtgaatggattccaaaaagccagttcatgcactaggcataaatactggttccactgccagaggccccatagactgcccaagccccacaattgacacccacattcagggggcctagtttggtcttatacaggttccccagctgtctgaatggagttcatgagctcccacttgctcaggtcactgtttctgtgggtttccccagcatggtcttgacccctttgctcatcactcctccctctctacaactggattccaggagtttggcccagtgcttagctgtgaatctttgcttctgcttcattcagctacttacctggcaggggagactacatgatcacataaccaaattttaaaaaatagggtacagctctgaaaagagaattcttaaaaggggaaactcaaatggctgaaaaacacttaaagaaatttcaacgtccttacccatcagggaaatgaaaatcaaaactactttgaaattcaattttacacctgtcagaatggctaagatcaataaaaacaagtgacagctcttgctagagaggatgagaagcaaggagaagactcattcattgctgatgggagtgcaaacttgtacagctactgtggaaatcagtgtggtgtttcctaaggaagatgggaatagatctacctcaagatctagctatactattcttggatataaacccaaaggtcactagtcccccccccccctccgagatagaatttctctgtggctttggtggctttcctggaattcgctctgtagaccaggatggccttgaactcaaagagatccgcctgcctctgcctccccagtgctgggactaaaggtttgtgccaccaacgcctggtccctaaggtcactttatcctaccagaaagacacatacgtgctcaaccatgtttactgctgctctattcataatagccacaaattggaaacaaccaaatatctctcaacagaagaataaagaaaaagatttgtagctgggcgatagtggcacatgcctttaatcccagcactttcaaggcagagacagacagatctctctgagtttgaggccagcctggtctacgagcgagtgccaggataggctccaaagatgcacagagaaaccctgtcttgaaaaaccaaaaccaaaaaaaaaaaaaaaaagtatgactaagctgttaaaaaatgacatcatgaaatttgcaggcaaatggatggaactagaaaaaaattcatcctcagtgaggaatcccagacccagaaagaaaatatggtatgtatttgcttatatacggacattggctgttaagtcaaaaataaccaagctacaaaccattgaaccagagagatgaggtattgagtaaggtgtcaggtcctaaagaaactcagaacaaatggctaattgtagtgcctatttaatatgccaaagcacatgctgtctgccaggctcctttagcatagcaagcacctgttaccagagtcctggctcctctcagcacttcttactcctctctccccccaccccccaaaactctccagccactgagtgttgcttcccttggcctagattactagaagggatttttttcttttagattttatttatttattatgtatacaacattctgcttccatgtatatctgcacaccagaggaaggcaccagatctcattatggatggttgtgagccacaatgtggttgctgggaattgaactcaggatctctggaagaacagccagtgctcttaacctctgagccatctctccagccggcctagattactagaaaaaccctgtcattttggccacatgttctctttatcctcttcatcctctattcttggctcctggtccttccccttgcctctgtctcttttcttgctaccccctcagccctcctctcttggtctggtctattctgctggccatgttcaatccattactttctctctctgctctggattattctccctcatatctataataaaacttctcctcaaccatacccaggaacagtcattgttgtggggtattcaccagagaagaccaccagcccacaaataatgacacagagacttattattaattatgaaagcttggcctttagcctaggcttgttttcaactagctcttataacttaattaacccatattttttaatctacaattctgcctcatgactttttacctcatctctgtgctgcatgtcctgttctccctgcctaagtattggccattcagttccttattaaaccaatcacagtaaaacatcttcacaaagtgtacaaatatccctcaacaaccccttctcctcccaaagattagaagccatattgttacaaggtccaaataagttcattcctgttttctgtaaaacttgggtttgataccattttttggaacttgacatgttccacatcctataccttgacctctgataagaccctctggaaatcccccaacctttgaaaacctcctagtcttacagttcttgagctatatacattccatgtcctcttgtgtttgatgcttgtggtgatatattatttatgatttatttatcatagcttctggctgctgggattaaaggtgtgtatcaccactacctgatctctatagcttgaagctgactttgctttctgaatcctcaggcatgctttaataaatcataaataatatatcaccacagatgctactctttcaaaccctgctttaaggaaatagccctgtctgacagaaaataaagcttatttaaattgactaaaagaatctgggtaatgatctttactcttgttcagtgggattaacaaaaccctttgatctacagtggtgtcctgcctgcaagatattctgggacaatggtggcacaaagcttgtgagagtcacccaaccaatatctgatttgacttatggcctactccacaagatggaacccatacctgacactgcctgggtgaccagggacctagggttaagtcaaatactactgttctagtaaaggaacatagcaatggttcctaatggcattatgctctactcatagagcagtgtcttgcatagccatcatcagagaaacttcctcctgcagcagatgggaacaaataccttgaccccacaaccagacattatgcagagtgagagaccttgtaatactcagctgtaaatgggatgtctccaccaagtccctcccctcagggcgcagggaaccctgtggaagaggaggcagaaagagtgtaagagccagaggcaacggaggacaccaagaaaacacagctcactaaatcaacatgatcaggcagcatgcacaggtcttgcgcaaatctgtgtcaggtcctttgcacacaggtcctatgtcttccagtatagtgtctttatgggatttctgagtgtgtaaacaagtgggtccctaattcttgtgcctgctcttaggcttttattagttttgtccaatattgatgtgttaggttttgcgttcttattatatcttattatgtcttaatttattattatcccttagaagcctgtttgttttccttttaaagatttatttattatatatacagtgttctgcatgtatgcatgcaggccagaagagggcaccgactctcattacagatagttgagagcccccatgtgattgctgggaattgaactcaggacctttggaagagcagcctgcgctctctctctctctctctctctctctctctctctctctctctctctctcctctctttctcttctctctctctctctttcgagacagggtttctctgtgtagctttggagcctatcctggcactcactctgtagaccaggctggcctagaactctcagagatccccctgcctctgcctcccgagtgctgggattaaaggcctgcgccaccaacgcccaggagtagagacagaggaaaatgtaaatcaggatatattatgtgagaaaaacatatattttcaataaaaggaaaaacaattttcaaaaaacaaaacctttcatctgttcatggacaaccatagtttctcccaccttttggctactgagaatgattctgtaaagaaggtggaggtgtacgtatctggtagcgaccctccttattgatgtgtgtggccagagaattctccgttgcgtgtggctgtccaaactggagggtacttagcaaataattccgggtgacaatctaaggaaacactccgtgagaattgcaatgtgtttcttttcacccttctttttacttttcaaaactaggcgaggtcgccgggcggtggtgtcacacgcctttaatcccagcactccagaggcaggcagatctgtcagtccaaaacctacagagaaacctgtctcgaagcccccgcacccccgcaaaaaaaaaaaaaaaatagcagaggtcacaaagctatcattccgaaagcagaagaattctggacttgagaccagcgaagatagtctgcgtcctcccacaaccaagcctgtcttcgtagtgcacgcagcgccgggacttgtagttccgagcttcacactggttccaggccgagcaaccacttcctcgtcgctctgagtgcggcggcttccggaagttggggcgtgttaaaagcgtctacgttctttcccccgcctcttagccccacagattgacagcactaatagccaacagataaccggagtcgtgtgtcctgttacatgattggtttggagttttgtaaccgcccagacaaacttggggggaattggctgaaccacagttttgaaaatcgtagattcgcccgcgctcaccgccccgttggtcctcggccgcagcgagccctgaagaccgagtccagagggtcgggcttggccgagagcttcatctgcggaggccgcggactggaatcggagtagtccgggaagacacggccccgccggtgagtgagtgcaggcggccggcgtggcggggtcgtggtgctcggtatctggtccggtccgcttctcggcccgagccgggcccggggcttgacctctcacccttgcctcttgttgcctgtgggggccacttttcaatggtgaatggcttggaggtgacctcctttcccgtgcacttgggccctgggatctgagaatggccagatgtcccctcccccacgcggggcctaacacctagtgcacagcctgggctgctgtgtggacccggacctgagtctctgtacggtaacggctgctcagcttcccgcaccccagctgagcagcatttttgaacagtcccaggtccggaggccgatcctgcctctcttattttgtcattcccgcaagtgcagtctcgtcagcagcgcagttgcatccagcctccggctgctcagggccaggattgtgccgttctgagcttgtaggtagtgagtgtccaggaggcctgcagcttgtggtcaagagcagtttaaatccaggttccgcctcccaatttactttgacttagacttcttgtcaccttatatgtgcatgggtaccctagaatatgtggcaagaaggaaatgagagggtccctggcccggagtaggactcagaatgagagagcaactatagtgatggatcttcgtgcttggaagtgtgtggggagaggtgcttggttcacttcttgcaccctttgtagagatggcagtggcggtgctaatctgatgaacggcacagaagtatgtatggaaaggaactgacctctcttctccccgtgggatttgggtgctcagttctttaatgggctaaaggtgaagtttcccaggagtcttcttgttacacccctggcttctcagggtcacctcttctaactttcattcagcgagggcctgctagaaagcacatttccctatggaagaagtgtgttttggacttggtgaaagaagcttgcacacaagttggcaagtttgaacagatgctttgttaaattacccacttgttgctttctgtagttcctctgcaaacctttggtgtccttgaacagttttcactttgctgaccttgaactgaagtcttgggctttgccagggcctagtgcagagggatgggaggactcaggggtggcagtggaaaggccgaactggggattagctgactgtacagttaatgcattttcctatatctcccgtgctcctatctgtttgtttttgcctcagttagtgctcccttggtagttagctcaggggctttgggtatgtattggcctgtcctaacctgtgcctagtgagtcactcactgagtgtccctgtgtgtgatggtggtgataagggaagctttaggattagttgatggatgtatgaattcattccacaagtgccagacttctggagggctattcactttcttgttgataaataagactaagggcttgccctcaggaagcaatgtttagtaggtagagagtagcagtaagcaaacataaacaatcactcatttgctgagcacataactggaatctgtgtgcgagatcttggcttggattggagggctggccctccctaaggagctgagagctaagtgaagaagccatataaaacaggagacagttcctagaaggcaggacttgtttgtaggacaaagggataatgtgccctgcaaatcaaaccgaagaactttaaaggaaaaccctagagactacatcatataatggcattaagttacagaaggattagggggatcagtaatctagctcttccttctgtagcctttgtaggtgagaggctgaggtgtacatgcgtggctcttgcttttgaaagtgttaagtcgggtagtctgactacagtagatggccagttcaggcaccctctccactgttgctaggagtcttagctggggtcatcctgtggattcctgggagtttccctggatcaggtttctccctaaccccatcaagatgtctttttcattactgttcctaatagttatcagagagcctttatccagtaactgatggatgcagatatggagatccacagccaagcactgggccttgtccctggagtgctgaagaaagggaggagaaattgtatgagccagggaagtctaggtcatgatggaggaacccacagagacagctgacctgagcttgcaggagcacatggactctggaccaactaggaacctaactagggagcctgcatggcactgatctaggcccccagcatgtgtctgacagttgtgtagtttggtctgtttgcaaggcttctagcagtgagatcaggacctgtccctggcacttagatagcttttgggaacctgttacctttgctggattaccttgtccagttttttatgtaggtagggggaagagcttggtcctacctttccattctttgttcaaacccatgggggtctcctttctgaatggagactgaggaggagtagatggggaggagagggaagggggagtgaacaggaggagaggagggaggggaaactggtcatatgcaaaataaatgaaaaaatgttaattaaataaaattaaaaaagaaaaaagttatatattatccaaaaaaaaagaaagtgtaagtcaagtggtggctcactgtccctatgtaaggtggagtctgatgtattgtagctatcacccactctcttgtttattccttgtgtgtttattggggccccactctgacagtaacagaagatcataaggcagatatccaagcaccagatttttaagaaagtaagaaaactggcattgcatcatctcttgcctggtatttatagacaggttttcccgaaagcaacacatttctcattcactcacctcactgtcccttatccatttatcaggcagtaactctagggagggcgtatgaggtttctttggagagcctgtctgtggacccctcattccttagcatgcaccaccattctcagcactgctgtccatttacttgtttatttgtgtgtatgtatgtgtgcatgttgtgtgataaaactctacctggggacatgcaacactccagggtcaactcaccctagatggggaacccacggtataccaaagtatggataccaccaaagtctaacttggtgaaccagtgagttttattagggttacttacaggagcagaaatgactcaaagacagcatcatcaccaaggcccacaccagcaaattggtgacaactcacaaaaactgggaaacctgcagttcattgcatagattacagccagctcaacagattagacagtgtcctttccaagtgactcagtctaagcctcatctaggaagcttggctgctttctgcttcttgcagctcattctgtctgagaatcttgttggcagctgggctcttctgagagtcttctttgcagctcagctgtccttgtgtgagagggactcactctcagcttttatttttactctggcagagaaggagggggctagtgaatttggtccttttcaggtacttcctggagctgttttgagttgttgaccttcttgtttaaggagcttccctgaagatggaaatggttcaacctgggaggaaactatgagcacaatggtgcaggtgtggcttagctcactcatgtggcatcgtgtaagagtcatttctctcctcctcccatgtaggtcccagggattgaacttaggttatcaggtatggtggccagtgccttaacctgctgagttgtcctgctagccttccactgtcattttttaaagaggcagttagatatgatgtcctgatggtctgggatctggggccaacacaggatggccatgtcttagtgcccatccatgagaagtaggaggagagctcccaagaaagtaaggcagttctgtatttgggtaacgagagagagtatggcaggtggttgtttccccttgatccaggaaggtagtgcatggtcatattaagccccaaagaccatttgtaaagtttatatcagaattagagtgtgggcctattgagacagtcatgctccatgtttgtgttgtcaaaagaatgggatcactgtaatgtcatttctttgggtgagatgaggctactgggttggcatttggaattctgcaatggcaagaggttctgtattgtgagatgcactgggttagacacaggatattctgtgtgatttttgtgtctggtagactctctctggaaaaggtcttaattcctagccttgaatccttatgtttttgtccctaccttcaccagacagtgccaccatggggaccacagccccagggcccattcacctgttggatctatgtgaccagaaactcttggactttgtctgcaacatagacaataaggacttgatgtggctcaaggagattgaggaggaggctgagcgcatgttcatcaggtaaaagcaggggcatgctggggtgggtgtcctgatgggtaagacaaatagtctgtcagggttccttcctgagtgccttgtgtgctggggccaacctagtcagtgggcaggggaagaggcgattgagcccttctcctggttcactgcagttagcagtgtctctgagtgtgtggcctgaacttgcttccctgccatatgaccaggaggaagctctgagtgtccagctggtgacttcacttagctttggagtgctttcctggtgatggtctctctagtttgatttgtcattgccaagaatggggtggaatgtagtctagtgagagaaggggcagctcagcagttcctagaaagcctcacgttcactcttttgtacttaacagagaattcagcaatgagccagagctgatgcccaaaactccttctcagaagaaccgtcggaagaaaagacgggtgtctaacattcaagatgaaaacagagatcccatgaggaaaaggtaggaaagactggggaggctgcactagaggaggtctctggacagtagacctctgggagagtttgctcctgaatgtgctgataggagcacagtggtagctggtacccgacgctgacacatttttgccataggcaaaattgaagcgcgaacccagttcagagtacaggtgtgaatttctgtgcttggggcagaggtggagatggagtttgatttgaggtttgaaggaggggagaggcatcagtggtgtggcccaagttgttggtttccaactcctctgttgggttatagttccctgcaggaatggtggtgactacagtactcaggtaaagatgctggtcattccaatcagacagccctgttatgtatgtcaaccacagtttcaagcagctgtatgtccttggaatgaatttctgtctctcttgtttgctcattttccaaagtggagtaatggtgcctgcctcctagggccatcatctcagtcttgtagattgagagcaagagtgaagtttgtagaaggtgcttagcacagtgtgatcacagttgagaagttggtgtgaatttactcttcccagcagttctgtgagtaatggaactcactgttatccattcatggttgggaaggctgaggctcagggacaactggggtgtcatggcgagaggtggtagagtctacattggaacctccagattttgctttcaggtcttttgctcatacttcattgaagctggtggctactagggagattgatatactctaattttatttttggggtacccctgccctgctgggctgtctcagcctctgttttgctgccacaacaggttatcccggaggaagtctcggagcagccagctaggcacccggtgcctccgcagcaagaacaaggtggagaagccggctactattgctggggagaatggctcccctgtgttgcggagagtaactcgggctgcagcggcagcagtggcaacctctgtggcatcagctgcttcctctcccactgctgggtctcccgcagtgatcaagaaagctgtggtggaggtcagtgccagagagcaactgagtgcagaactgtacctcattcagagcaaaggtagcctttctccatcttcagtcccagctccagccactcctccagcttcccaagacatcctgacatcggaggaggaatcaacacccaagaaggcagaggctgggaagctggaatctgttgcagtgagctccttcaaggctacaccccaaagccccaagaacagaggagttggggcaggacgttccgtttccaagctcaagattgctcgggcctcccggggcctgcaggactctccagacttgccatggcaggaaagggtgctttctcctatcctgccaaataacatcttgcccaccacagccaagagccctcttggggatgttcagtcagtgccactagccaaaaaatactgtttggtggctgggcaagaaaatgctagtcgtaggtcaagcagaaggcttgccaagaaggctgaaaaggagccagaggcctccgcccgaatcatctgtgagtgtggggcaggtgtggggtgttttctgagagctttccattgagccttcagtgatatgtttctgtatatccatgtgaattctgcatggagccattagctagctgtgcctggctgttgaaaatatgtctagtctgatggagaagctgattttatgcctcttgagtgaggcagattctttactactgagaagtagcccccaacccttattttttttgtttgttgttttgagataggctcttgctatgtagctcaggttggctttggacttaaagtcctcctgcctctgtgtgtcaaatgtggtcctgccacacctccccttagaattataagggtgtactaccaaggatctgaattttaaggttttgtttgtttgtttttctttttaatagtatgtatgtgcacatgcacacactggccatggtgtgtgtgtgtgtgtgtgtgtgtgtaagtcagaggaccacttgtaggagtcagttctcctttcactgtgttggtcccgatgattgaactcagattgacaggcttggcaacaggctcctttacttctaagtcatctcactggtcctgggatttaattttcattgcactttcttcaatttagatttaaatggccacatgtagctagtggctgccattgatgggtgacagatctagttcagcattgtttatagatgagaaaataggcctagaatgtgttagccccagtattgccatggtcctttttcccccagtcagtatatccctcattgctgttttagagtgacagacttaaattcactgtcactgtgtggaactcctgatggtgaaactgctgtggagatgtgccatgtagaccatgcaggctggtacctggtagctgccttcattatggtcaaatctaagcccaggggaccaatgccctgggagaatagatcctgtgagccgtagaggagagtaggaagccccgagagtcagggttggctgtctgagtgggtggatacttgagggaagattttgaaggctggctgtgctctggccaggtggagaaaatatagcactgcctatcctggccaaggaaacatcttgcacaaagacatggagataccaagtaataagtgatgggctgcctggagcttcttgccactaaagcagatgtagtccagtgatagctggaggttcttaggaatcctataaaaatagagaagaggttagctcaggttccttcaagacccaggtcaaaggacaggtcaagtttcatagtaaatgggaagtaagttcacctggcttttgtgagatttatgtaagacattatgtctgtgtcaaagtacttttggctcctcagggtttagaccttttagaagaggaaacagaggttgacaagctgtagagtccagaaattgagacttaagcccacttgtattccatccaggaaggcaggtgctgaggggctggggtttgtcagacaggtgaagataccacactctagaaggttctctttggcctggctctaggctctgtagcctggagagacagtctggaccatatgcagcaggaggtttgacacactgtccattttggattgtcaggaggcttggggtggggtgggtatcacaggtccttcttagatttcttcagccctgaaattggtccaggggagggtccacagggctagatgagcctggagctatgagaagggtaggaggaattggggagaatctcatacaccccctcctttttttttttttttttttttttttttgaggcagggtttctctgtagctctggtggtcctggaactcgctctgtagatgaggctgtctttgaactcagaggtccttctcctaagtgctgggattaaaggtgtgtgccaccatgcccagctttctcttaattaaggcccctgttttgttttcttttcctccatctccctgttcaaatcatgtttaccctgctattcgtttctctacaccccccaccccaccccaccagcccctttttgccttcctagttcctgcagttactccaggttacctcactcagtacaatcttttctggttcaatctgtgtatctgcagatttcatgatttcggtttttctagtggaatagtgtatatcaacccactttttttttttttgcagatttttttatttgaattagaaacaaaattgttttacataacaatcccagttccctctccttcccctcctcccctagtcctccccatctccaaactaaaaccctacctatcacatatgctttctgctccccctggatggtgaggtcttccatagggtgtcatcagagtctatcctatcctttgggagtacctaggcccacccctgtgtgtcttggctcagggagtattcctctatgtggaatgggctcccaaagttcacatctatgctagggataagtactgaactactacaggaggtcccatagatttccgaggtttcctcactgaaacccatgttcctggggtctgaatcagtcccatgctggtatccccgctatcagtctgggaaccaagagctctctgatgttcaggtcagctgtttctgtgggtttcaccagcctggtctggacccctttgctcttttcatccttctctgcaactggattctagttcaattcagtgattagttgtaacccaccacttttatagacattgtggaggggcagttgcaaaggcttgtcagttggactagttggtggtaggatacaatttaaagcttccagctgtgtgttcccaaagacactgccatctttatggggactttttaattccttgaatgaaggcatattatcacccggccccagcatgttgttagcattccaaccagaaagatataaatgctaccttgtcagggttgtaaccaactttcttaatgatgtactgacttccttaatatcctcatagttcttcttgctgtagggtgacttgttggaatccattttgttggtaccagcaatcagctgtttcacacccagaatgtaagtcaaaagggcatcttcacaggtctgcccattcttggggataccagcttgagatttagcagcactggcagcaacaatcaggaccgcacagccatcctgagatatgtctgcactgatgtttttgatcagatctctgtgtcctgggtctttaatgatagtcacatgtttactggtaaaatttccacagggagatgtcagtagtgataccatgctcccacttctagtttctccaagacccaggcgtacttgaaagagctgcttcctatctcagtagcctccttttcaaacttgtcagtggtttgtctgtcagttccaccacattcgtaggtggccagtggcggtggacttgtctgaatctacacatgcagtggtgactgacactgttggttcgagtcttttcctttcctgtttttgcttcaaattagtgacggttttcctaacagtggaccagcattgtctgttgctcttctccttaagccttccctgcccatggatgggcttctgggctatgtgtgagcaagcctgtctaatcctaagcctagcaatcctattccttcttgagatagaggaagtgactccagaatgtggagtcactcagcccccaggtgaccttgggtataccttctcttttaagctcagttgcctgtcagaaatggtaataacatttgccttgagtggagttggagaactcatcttagtgcttgggtatggtatatgttcagtaattcatttagacaagttaacctggggctgtgttactgaaacttgaggggtgagaaaaggcaaggcaaaggcttcctgatgcttttctgatgccaggttctgaggtggggctgggtgggcaattcagatagcatgtcctttgggttttccttaaggtagctttgacacacctgcagcaggggagtaggaaggagaaggggactggcggtaaaggatggttcaggggcctcaggattctagtggtggagcacagaggactgaagccttttgtcctcctgatctggtgtgcactccccaggaggaagctttttgtcattagtgggcaggcagggacaagggtcactgcttcgcagtttctagaaagtccagctgtgtaggtagtcagctttatccttcaggcctcatggccatttttttaattggagggtagctcctcctcagtcttcagtctttaggccaggccactttcttgacactagaccagttctggcatgcaggggctgcctaacattccaggaagtctttgtgctatggaatagttaggtgttcacttgggtgtcttctggctttttttttacctcatccctcctccaatcaaggagcttggagttaccagagagagagagaggcaagggcagaggaggggaacatatcttctggccatggacccccctcaaggtagcacctatagctagctgccagtcttactttgttgctgctccctcctggcccctagcctggatcccatagcccagaaaggagaaactcctgcttcttgtcactgctcagttctctctgagctctgccaattgttgctccagcttgttaccttcttctcttccttgtttttctttggcccagggcagccctggttccttgtctgcttagttctggccttcttccctgacccaggaaggagatggactttttctaggcccccaagccccttctttcactttgtggttttggttaagtgtcttcccatctcactctgtagtccagcgaggcttagaatttactataaagctcaggctgactttgaacttgtgacaatccctctgtcccagcatcctgagcgctgggattaaaggtgtgaaccgtcgtacgtataattaatacttttccaaggacttccctcattgaaactgggcattgttttactgggtgtgataggatgatagggtttggtgctgaatgaagccttgatgggtactaagcttcagcattttctccttggctctgttgctgtttgggctaatgttaatatagtaagaaggaaaagtcacactttacagtggtgaaactagttaagacctttgcatatccaaaagggtctcaagtatttccagcagttggagaacacactttgaaaaacagcatcttcctcttcctcctcctcccctttggcttcatttcaggtctccctatctaggcttcagcatccttgacttgatggctgctcgtaccctagtttactgtataagatcacctgatgctggtaggaagaccgggcagtggccttagttttccttatcattgctttgagcctctagcacccgacttagaacccaatacatagcaggtacttggaatatttgttgtgtgagtaagctgcttatgttggggcccagtgttactcagacatccatctttccaagctactgctagcctagtgaagaggtggaggtgtgcctgctagacaagtggcataaagctaacagctgcattgggcgtgtgaagatgaatgagggtgagatcagggcacagagaggcctgtgtgtgtctatgaaaggagtagtgattatgcccttgtcaaaacttcctggatctcttggtctggttgctgactggtttccaatagcatccccccctcccccaatttctcttcaggtcacagttacctggagagactcctgaatgtcgaagtgcctcagaaagttgggtaagttccatgccagtgtctcccacaggggtggtcagggcacatgggggtggaggttggactctccacagcactcctgatagccatgctcccttagcctggttcctgtgtaaccaggcagcaagcaacatgactgtcaggtctctagacaacattccatctgtatcacttgtcagctctagctcatgagttccatggctgtaaatgaggcataacaaccatttaaagtggggtgatttgggattcaggggtgcttcctgtctggattagacctagcattacttagggccaggacactgacttctcagaggtcttactctgctatcctaaactagcccttccttactttggggcagaggttcagtgcttgggatgaggaagtggggtctgggaaaacctttggcttagctgcttccccaaccccccagtagtgagcaggtttcaaaagagatgggatttttctggaccccatagattaagactgacctgggtaaagtacttgtgtgccactgtattactggaacaatgactaagatattcagcttacaaaggaaaatggtttatcttagctcacagttgtagagccttccattagtgaccagtctgctctgccgctttggaggaatggtacatcatgacaagagtgtggtagaacaaaactattctacctcatggctggaacttgataggagaaggggggctgtggttccatactcaccttcttgggcatacccctaataagccaaagttctccagctaggtccacctgttgaagtttccactgcatcctactagctgtattctgggaacaaagccttgaatacataagtctttggggacactgaagctccagaccagatcaggttcccatcccaaatgagatccttgacaggatgataccaaaaaaattcagaaactgacatcactctctactcaggaagccactagtaatggctgctgtcttcctatccagcctagactgttggtttgtggtccaggtctggtcacctaacattgaccctaacttgaggaaattaactaaaagttctcatagtgctgtgctttgctttcagtctggagcaggagcccattgaggaggctgaatctgaggaggcagcagaggagacagaggtaagaccacaggccagaaatgggtaggactcgagccctccaggtctgaagctatgtgctgcagctatcctgagctcaggatccatgtgggcttcttcaagccttggtttttcctgtaggtctccaagaacagtggctgtacctcaaagcgccacagtgccaccaagattgtgattagtacgcctaccttgaagcctgtggccagtggccaggcagcatccattgaagagcagcaaggtgagttggcctggccctgtctcttgggatacagagccccattttctggtctgtaggccaaagataaattaagcctgaagaggttatgaccttctggctaaagctgctgctgactatcccatgagtaactatagatggctggttaggaagcatagagggaagggcgtgaatgaggcaaaggtttgaaggtgcccactccaagggattcatgaagaaatacaggctgggctctgaatgcctacctagcttcttgctcccgcttctagttgaaaaagggccgggttactgtgggctttcgcagttggtcaggagccctgcctggcttcccaggctactagtaggctcttggagtctggctcctgtttctctgtggaggtggatttctctagtgtaaagaaatggcagctgtaaggtttgagcaaagcatcctgtttatgaaggggccaaggatagttgtgccagcctgaaagctcccaggactgctacaagaccctttggagttaaagggcacttcctcttggtgtgaaatagaatgtcctatgccctgtatgatgtccccatgaaaggaacctttttctcctgtcatggaggtaccaactgcaggctaagagaggtgtgtttgattgtggtagagtttacagcttgttataaggtttctgcacatagctttttgtgatagagggagtggcatgtagattggtgatattgtcctgtcatttgtgtcactgttgacaagggtttgggctggaggacctgacttgggggccagtatactgggctcaaggctagttactgcttagattggtgtttctgccattggccaccctagggttaccatgctccctgggttaccttgctcctgctgtaactgttgctgctgtaccccttccctaaaagttgcatgtatactccactggcatcatccatacaacctctctgaaattgctctcttcacagaagccaagcctgaccaaacagatggacacagaaaagcacctcagagtgtcaggtgtgcacctgggaaggggtgtgcaggcagctctgttctgagggttccagaggggtttgaaccaagctggggtccttttgtagggagggtaggtatgtggccaggcattctgcttcttggttggtgtcatgactcgatcctctgactaaacaaaggaagcagcatggtgctgtagatgctggtttgggaatgggtaatcatgtccctcctcatccttctggctctgtgacctttgactggccagtgacatttttctgggcagcaaagggctggtctgcagtctcttccagtctggagttctgtggcttgaggccagacttgtttgcaaagggtgatttttataggatgtaatagggctatgaggtgggttcttgggtcctcttcatgatgtgtcctgtcctgggcagaaggaaacgcagctacaagcaggcaatgagtgaaccggatgaggagcagccagaggatgaggagcttcaacccccccagaacaagaccccttccccaccctgtccagccaacaaggtaagcaggttcttgtccttgcttggtgtgtgccctgcctgctctttgctgaccctggccctggtctgcaggtggtacgacccctccggactttcttgcacacagtgcagaagaaccagatgctcatgacccctactttggcttcccgtagcagtgtcatgaagtccttcattaaacgtaacactcccctccgtgtggaccctaaggtaagggagcctgtcccctggctgtgcttcgctggagctgggacagtgtggttgaagactcttagtttgctggaagtagtgtgggccagttaaaacctctgtagccagggattgcttcaatactgtggtgctgtgctgaccttatggacccaggactgtgactcagaaacttggtgagctctaggctggaaagtgggaggattgacttagcagacctaacactggccatcatgtcacagaccagtggtgggaggagcaggtgaagacacctttgttgttgggagggaggactgggtgaggtgaggtagcagtgtgtttggtgaaaagccctgagcacactcactgccacagataggtgcatagcctgccctgtaggacaccccttggcattaactcttggtgtttttctgtttcctctccacagtgcagctttgttgtaagtaaagccttttcctgtcccttaacagagctgcactagttcttggctagatccatgtcactgtgtagctgacagcccccgtggaagcactaaccgcaagcgggagtgttaggaaggcagatgtgcatgtgggggcactggagtgagtcaccaggatagctggtgagagccaactgttccgggactctgcatcctcccactgtagagatagccctctgcccttaccctgctacagggaggacaccagtggggggtgacctgcagtgtttatccaggccacggctaaaagtgcttcccacagccatctacttcctcatccccagcctgagggtctgagggtctgagaaaagaacagacatgtctctggtgtccagagccagaggtttattgggtcgtagtcctgatggggaatgtgatggggtaggactggtagctataaactggggctgggtcccgctgtgtgggttacaatgtagctattgtcattggcatctggaaacaagaccaaagatgctgttcttttcccagacacctcagagctgggctgagctggtctgggtcacttgctgtgatcaagagctttggagaactaggacatgggggcaccccacagtcctgttccctgtgcctggcagtgctgtgtagacgttatgtcttagcttcttagcatctgtttaaagaatgcaaggtacacatgcatacagatagagtgtgatttcctttaaaattattttattcttgtgtgtgtgtgggtatgtgtgtacatgtgtgtgcgatcacttgctatgggacatttatggaaggaagttagagggcaggtttttttgttttttgttttaagtctgttctttcatcatgtaggttctggggatgaaagcaaggttgtcaatcttggtggcaggcgcttttgcccttctcagaggtctgggatttaaaattaaaagtgcagggtagaaacactacaagggaagaggagactgagtgggtctaggagaaaggggagctggttgctttggcagatggttttctattctgataaacttctgattgacagttaaaaatttgacctatacaggtatgggttatacatccaataataattttaacaatatgtatgtacatgcaatgcgatgttaatcaggtgcccccccccccaagttcatactgaggacacaggttgctttattatgtatgcaatctaaagctgctttggctcacttctattctatgatgggttctggggtgcatttgaccataaactacagaaggaattgccagggaggaggagaatactgctttttctggaaagggatgtgtgtagctgcagccagaacagttgctcagggctttgttggaaaaggggtgcttgttgctcaggtcatgtaagatgtcctgggtggctgagctctctgtacacctgcctgcttctcaccttcatgcagcccctgttgatagagctcctgaagacagttgggaagacatctggagggcttctgtctttagctgatgccttggcatgtgggatggtctcagcagctggccagatgggtgctgagcttgtttgtcctgaggagaggcttctcccctctgcttgttcgaggtgacagcatgccttccagtctgttagccaactgtgtggcttggtggagttattttgtgcctggcagtgaagaaggcttgacttgttccttcttcaaatggccattcatttcctcccttctctgtattgactggggccttacaggtatcccgggcatagccaggaggcactggaagttgtcctttcctgctttggggagcccaagtgcctgtacagggcatctggtgggtatagctcagataccagagactgggaaggttgaaatgttctgggccttggacacctgggttttctcagctacaaaatggaaaaagcagtgagtagcttcaggaggtctggtgacttggagagtgcgtgtgcatgattgagtgcagggctggatgtaaagtagttttggggacacatggcagggagaggtctcaggtgaagcctccaggcagaaggggctactccagcttatagtttcctcccattttgcttgggccttgcaggtggttctgggaacatagatgaccaaagctcatttgaaatcggggccacaagaggaatgaattctgaaatatgaaagactctgaaagcactggtcaaataatcaatagaataaatgctctggctggtgctgggaaatttaacattcaagtttaagaatgaaaggctggagtctgattggctctaggaggagaagtgagagtggtggtggtgaacattgggtaccacccagcctttgcttctgaaatgttttattttccaaggacagcacgtatgtacagtagggtgggagagaaagttggagtgtgacccttctggtgtgtgtgtgtgtgtgtgtgtgtgtgtgtgtgtgtgtgtaagacatggcctcaagtagcccaggttggctttctgcctctaatcttcctgcttttacctcccaaatcctgggattctaggtgtgtttcactatgtctggttcccattttccttcttgagtctgggtagttggagaaccagggacctagtaaaggtcacccatttcttccatgtggattcctcaaagacaggtgcttttcaggaccttcttttcagcttggcttctataggtcctgatgtccctctctctttccatttctctcttaaatgttttttgtttaaaaaaattcagtgtggtgaaattttggggaaggtgtttctatgaattttagcatgatttttgtagtcattaccataattgggatatagaccatggccaagttcattacccacagaaagctcttagctactccttgacgtccacagcatcctcatcctctaatctcagccgccacacacctgtggagtcactgcgaatattttttggaggatgtcctgtgaattgtgttgagtcatatgctacctttggtggttagctactgccttccagataagattttattttttgggggggggggttggagacagggtttctctgtattgttttggagattgtcctggaactctgtagaccaggctgagatcgcttgcctctgcctccccagtgctgggattaaaggtgtgcgccaccaatgcctggccagataagatttttgaacctatctaaattggtgcatttgaagcaagtttcttataaaaaccacctaattggctttaaaaatttttttttttggcagtgtcttctattgcacacacatatttcacatgaaagggtgttttatctgcatgtatgtctgtgtaccatgcgccacttgaatgctttgttgcccaggaaagccaggaagggcatcagatcccctggaactggagttacagatggttgtgaaacaccttgtgtgtgctggaaagcactagtctagtccttggccagggaaagtttggagcccctctgcacccttgctcttgtgtatagatatgattgtgcccccatggactttctggatctgcctggggggtgatgccagcactgatctgctgtacagctaactatctcttaacattgttttaaaaattattaacacaagcatgtatgtcacaagaaatttggaagctaaaaggaaagacattccatccttgatggagctcactagcctgtataactgttaacatttgatggtactttatttttttaagagtggtgcatgagcatatcctagcatgtgttgaaagtcatagtacataaccgttcctccatcctgccctcgcaaatagagcattagcggacactttgtaagttgccttcctttctctttgcattcctagtctttcaccttttcttcaagctgtttatataattataattaacacacctctgatttgaggcagctttttgtgttgcttatggctgggctttggggaggcattcaggtccacctggaaggagaaactgaatgcctgtgcttgcctaagatgtgctggggcatctcttcctgagaggcatctgctgccacgtctggttgagaactggtgcacactgccaggcagcctttggggttggtgggtgtcctcattcacatccctcccccctgccctctgcaggagaaggagcgccagcgcctggagaacctgcggcggaaggaggaggctgagcagctgcgcagacagaaagtggaggaggacaagcggcggcgtctggaggaggtgaagctgtaagtgtcccaactaccagttcagcttgccccagcctagtcaggctctccttaactatgctgtgcccacaggaagcgtgaagagcgcctccgcaaagtgatgcaggcccgtgagcgggtggagcagatgaaggaggaaaagaagaagcagattgagcagaagtttgctcagattgaggagaagacagagaaggtgattctgggctgatgggcagcgagactgtaggtgggtggtgcctgctggggtccatgtactttaggcttggcagcctgaagtatgggactagacacctctacaagtcattgattgggtgctctatatacctctgctttctgtcacatgggctttggagtctcttctgtggcaagttaaatgctggaagtttgccctaaatcttcccagcagccctttgtgagtgggcagtcttgggcactttttgtgccttttccctgggctctgagcagcaagcagggtttgtagtggaatgggggaggggggtacctaccacagagctctgggtctcactctgcatgctgagtgaggggctgctccagagagcacatgtggattctgcaggctaaggaggagcggctggcagagaaggccaagaggaaggcagctgccaagaggatggaggaagtagaggcacgcaggaagcaggaggaggaggcgcgcaggctcaagttgctccaacaggtgcgattacaggtggggacagggaagaagtggggtaagccaggccctgaatgcctccatgccgtgaggactagctggacacacccattctgtagagtagatgtattagatcttcttgatgacttggaggttgggtggtggtggtgactttttctagactctgacttttgaggattaaatgtgtacatctggtgtctggcttcacctcacagctgctatttcttagcaggttactcaagtagcagcagtcttgttgatatggttgtagttgaaagcaaagttcactaatgtatatgaagcatgccatgcctggtatatgctgaatgtcctgcaggtgactgcacttaccctccatccttgagtcttatgcttggaagagtagggccctgcctctccctgggaactggcagtcttgctctaacggggaacaaatgttctagtactaaccagtatggcctacttttgctgtgatagacatgtcttaaatattaatgtgtggtaactcaacagctccaggaggtgcaggtgttgctcttgtcctgttttacagatgggaaactgaccattgggtcagatggcttgcccattgtacacagcttaaatccaggctccactcttactcgttagttcttgtgcagcagctgccagatgtcttttcagtctggccatggcttacaaaacttctcttgccaaggaacgtggtgactgagttctagctgatgtcatggtggcgtccagtgccttaggagcctgggctgtgggcaggagcagccctcagcccctggctagtcagtgcattgccaactcaggaggaagaggcgcggcgccatcaggagacgctgcagcggaagaaggaggaggaactggagcggcacagggcagctgaggccaggcggctggcagaacagcgtgagcaggagcggcagctggctgagcaagagcggcggaaggagcaggagcgtcttcaggcccagaggtgaggccacccactggccattcactactgtcccgtgtggagaatgagaggcagcacggccattgcttggcagctctcatcttcgcctgaagattggtaggctttcccttggcttcaaaaccagatgcctacagccggtggaccaccaagtagggtatatgttagctgtgggtgactccaggggtaacaactaggggtcactccatgtttggttctgctcccaccagaatgtgctaaccccttttgtctttctcagtggatacagtagggtggggcgaaccctcggacagactgatacttctccataaggctgccacaggcatcatgagcaggagggaagcttgtggtgcagtataggacactgggcatctttagccctggcccctgtgcttcctttggtgagaggtgatgggtgttgtggttggtagctctcaactacatgctctgcaggttttcttatctaatccttacttgaagctcttatggcatagaaacaactataagctttacagaagaaaatgggagactaaatgaattgttagaggtcaagctcctgagtgtggaggtgacaccataacccatccccaatccctcccctctgtgggtggagctgagagctgtttttttttttttttttttttttctgatagcaaagaacattgaacatttttaaaatgtatttatcagttatttggacatatagaagaatgtttttttttttttttttttttttttggtggttatgaccaggctgggggaaaggtgtgaaaaagacaaggctgaggctcagagaccttacttgcagggaagagtgcaaagggctgtatgttgagactccaaagtcgggctcagaatcttgcttttggagagtctagctgttggctctactctggcgtccagttctactgtcccattctctaaaggcatgtccaccaagcctaacctccctttctgggatgggaatggggctagggttccactattgccctcacagattcttgtggtccttcctcagggagatgcaggagagagagaaagctctgcggctacagaaggaacaacttcagagggaactggaggagaagaaaaagaaggtaggtgctgggaatatgggctccctatagggtctattctaagctgtgaggtgagaggattgggaagcctgggctagagaccctttagacaggcctgccttgccacatgcggtaacagtggcaagaggagaggggagacacacataccttgttgttggctgggtcccaggaagagcagcagcgcttggctgagcagcgactgcaggaagagcaggcgaagaaagccaaggaggcagcagcagccagcaaggtcttgaacgtgactgtggatgtgcaggtgaggcctgtgcccccggtgggagagaccctgccccattctctgtttacttataagctcaggctgtggtagggcctgaaccaagaggacagacaagtcaccagtctccccccccccccttttttcgtgacatggtctgactctgtaacccagactggcttcaaatttgtaattcttttacaaatttttacaaatgttaatccttaatttcctagttgtagggactacaggcatgtaggcctatacctaacttctctttttgctatttttcataatgcatagttttttaatattataaaactagaatgttacttagaaattacacaacttttttttgagaaagggtcttgctatgtagctttggctggcctggaactctgagatctgcttgtctctgccttctgagtgcactactatacttactctagacatctgccttaacacatgtagatttctttcatttgatggttatgtctcagttaatcacattgggatttaacaagctcctgttgatgaatgagtaaattgtttagaaaatacattatctcaaaaaaaaaaaaaaaaaggcaaggcggtggtggcgcacacctttaatctcagcacgcagcactcaggaggcagaggcaggcggatctctatgtgatcacggccagcctggtctacagagtgagctcagaacagccagggctgttacataaagaaaccctgtctcaaaaaagaaagaaagagcgaaaatatattatccctgccaccaagtgaagatgttgaagttatttgaaggaacggaggtctggttgaagtcatggtgtgtcttgaagcatctctgagggagagacatgctaaagtggaagaaagtcagcgtgacacaaagtgtttttttatattgcctgacttgtttaaatgaaaaagtgacccaaaagcttttcttttttcttctgcttgagaagtgggtggaggtgaccagagtgtcagtgccctccaggaatgcaggggaggggcgtaatggccgtgttgattcccttccagtctcctgtttgtacctcatatcaaatgactccacaaggacccagatcccaccccaagatcagcacagataactatgggatggacctaaacagtgatgactccacagatgatgaggctcatcccaggaaacccattccttcctgggccagaggtaagcagagtccagagctcctgaggattgggccgctttctttcctcacctttgtgggctgtagaagtggtggcttagctgctgcaggcgtataggctgatgtgctagtgcctagagccttttagccttggcctgagaggactgtgttgggctttgagcatgctcctagaggtaggaggatgaataggatgaagggtgatgagtttctttattattgttgaatgtagctatgtgacatggactcgaggcccctcctcagagtctggcccaggagggctcttgagacttgtacccgagcaagcacctgtgggtgagcatacaactgagggcatagcagggtttggttggaatgctaagcactaggaatggtcatgaggagaggggcattggtactagagcaggatttgccctgagtctgaaggtttcagatttatgtagtggtgtgatgctctctctggcctgctagggtgttttttaggattggtgaacttgagattagcacagggtgctgacctcaaaagaaaggtcctccaatcccacagtggtcagcactggacagtctgaaaagttactttcatgactctgaccttgtttgaatcccatgcaagtaactagactcttgcttttctaagccactcaaacaggggccagtgtggccagcaaagtctcctgatggtacttgatgttggattacttagtttctgtatctgtgaagacgatatgatattaagacccagctgagatgattattgagagagaagtaattcaggaacagtaccttgcgtggagcaagccctgagtgtgtgttccctcctcagcctggttggcagggctgtgattccctgtaatagctctgctattacagccttaggatctgtgagattggtggggatagccaggcaagaaggcttaagatctggagacaggcttgattttacacttattctgccattcacctgccatgtgctttggacaaggctcctcctaaaaaaatggggagaataaattattgcctgtgcctactcctggggtgctttgtttgggtttggctgctaagaagatagaagtaagagcatgattagtgttgggaggggatgggcagaagaaggaggcctccagaggaacagataagaatagggcagggcgtgctggtatggagagggtggctggactctgtagggaggatcagggaagctcccagagagcaccaggcagtgatccaggcctctgttttcctcaggtacccagctcagccaggccatcatccaccagtactaccaacccccgaaccttgcagagctcttcggaaccattctcccactggacttggaggacatctttaagaagagcaaaccccgctaccacaagcgcactagctctgctgcttggaactcaccgcctctaaaagccagtagggtccccagcagcctggcctatagcctgaagaagccctgaggcaggtcctcagtcctcctggcaggactgggcctatgtgtgtctgtctgtctgtctgtctgtctgtctgtctgtctgtctgcctgcctgcctgtctgcctgtttctgtgttgggctggtgctcttctgtctgatatgccattgctcaggtggatatcaatatcctctgcttgtcaggtgctgccagccctgtttggaggatgggcttggtgggtggctatcgaaagaactagggtcacattgattggtctgtaggtagtactctgtaaataaattgttacagttcagttgacttttagtttctagtgtttgtgaggtagtttaataaagtatataccttgaagcctgctgtggctgttgtgaagactaggcgctttaatggaatgttggtctgtagcagtatgtcttgggccttcacttgcagtgtgcctcaagatcacttggggccagatggtattccacccagagtttctgatgccagacagtcctgtttgtaagtggagcctattccttggaaagacctggcctgtgacagagctttgctatttactcttagtccttgagcctgaccactcctcaggctctgccatgcttgctgtgtggggagtggaaggacctgagaaagtccttgtgctgggatctgatcagggaaagaatgcccttcaacatgaccttgggacccgggcagccagggggagattttaccacaaaaccaccaggcactaagtaagtgcttagcttagtgcagggtggctctggtcctgatagcacctgatgctctttcccttagaattggggtgacccacgaggcagacagggcacatcaaaccaccattgccttgaacacacctaaagtaaggcccatgtactttgccatatcctccaggtcttctactctaaggacagttaaattatgtggcctgagaaactgacaagcttactatgggaacctgttcagaagaccttgccaattctttaggtcaaaataaagactaaatacaaatgaatagtgctttaaacactgaggaaacagtgagcacaatagtccaagtctagaagattcttcccacgcagagttcatttttcatttacggttcattcaaatgtggtgaacgaagtgccatttattctgttgagtaaaggggaaggcaggtctgtccaaaaccacaagatcaaactcactggtcagcacatttattcagtgcttagaaaatcaacaggatgacaattaggcggagtcttcgccaacagttggtgttgtgtgtattttagcaaccctaatggctgtatggagatacttcatggttttaatttgcattttcctaatggctgttggtgaatatcaattcagtttcttgtttaccaccttgatatcttttattggcaacaagtctattcaagtcctttgttcattttgaagtggagtttttactggggcgtttatgatgcttacattgtaggaatgcagtctttgtcagatgtgctgttcctagtctaaactgcagcctgtcttttcagttctaacactttcacagagcactatttctgatttggtgaggtctgtttgtttctttatgggttgtgcgtttttgaggtcctgtctaagaaatccaaagatttcctcctgtgtttcctaaaatatttcatgattgacacagtgcatgaggatttatgatcatctccagttaaccgtttaaactatgggctgtctgccttttgtttgtatttgagagcatgcagatggatgtctaattgtagtaccgttcattgaagagactcattttccactgagtttcctttgcatctctgttggggaagcacattggcatgggcccatgtgcagactgctccgactccatgaggaccagaacttgtaggaagtcttaatccagtgccttaattcttccagctttgtatttccttttctgaatttattttgactcatattacttttaccttttcatgtaaattttagaatcagcttatatgtataaaactcacttttgactagaatttcattgactacatagatagttggaggggagcttggcacacttaaaatactttttcagtctgtgaacagcttgtcttttcatccttggtttctgtcatcggcattttgtggtctcagcatacatcctgtacattttctgttgaatatttatttttgtggtgttgctgtaaatggtattgtttttctgattttggtttatacttgttcattgttggtatatagaaatacagttggcttttgcatgatggtcctgtattttgtgatataactaaagcaatactcagggaaatttatggcactattgcctcatgttaggggtgaaaaaagggtctacatggcctcagttgccactttaagaagttagaaaagcggctggagagctggcttagcagttatgagtgctgactactccttcagaggtcctgggtttgatttctacacccacatggtggctcacaaccttaactccagttccagggatttgatttcctcttctggcctccatggacactgtacacaatgtggacagcatagataaacatgcaggcagaatacccatacacataaaataaactagaaaaagattaattcaaagtaataaacaaatggcacacgcagagcagaaatcaattatactagaaagaaaaaaattaaagcaaaggcatgtgatttgagaggttcaagaaaaatccataaacctctattgagactctgaaggtgaaggcacaggttactttgtcagagaaagatggcatcaggacacttttaatagttttaaaatagtgataaacatcaggtatggtggtatgtccgtgtaaccacagcactcatgaagctgaggcagaagaaggggcttcagtttgaggacagtctgggctgcataatggcatttttgttataaaacacctaaagcagaacaacgagattgaacaatttatagatactgttgatgaaatgacgaatttcttggtaatacagatggtctcagttcacatcaaacacctaagtaacctatgaaagaaaccctcaccccctttttaaaaatttagaaacaatcattttacatatcagcctccccctctctttcttccattctcccatgcccactaccaacccacctcccacctgctccccagagagggcgaggacttccatgggaatcatcaaagtctatcacatcatttgtatctgggctgagatagtatccctccatgaagaatgggctcccaaagtccatttgtgcactagggataaatattggttccactgttagagatactatagactgcccaggcctcctaaatggtaccacattcagagggtttggttcagtccaatgcatgttccccagctttatgaatggggtcagtgtactctcactaggtcaggtcagctggttctataggattctccagcatggttttgactcctttgctcatccctcctccctggattccaggagtatgactcaatgcttaactatgggtgcctgttgaaagaaactgacgttttcccaggcgttggtggtgcacgcctttaatcccagcactcgggaggcagaggcaggtggatctctgtgagttcgagaccagcctggtctacaagagctagttccaggacagcctccaaagccacagagaaaccctgtctcgaaaaacaaaaacaaaaaacaaaaaacaaaaaaaaaaagaaactgacgttttagctcatctttcataagaaaaacaaggtgtgggtagcctgagtggcattacattcatttgtgtgtgtttgtttgtgagacagggtttctctgtttagttttggaacctgttctggaactcactctgtagaccaagctggcctcgaactcaaagagatcctcctgtctctgcctcccaagtgctgggattaaaggcatgcgccactatcgcctggctcattacatatttatagaggaaaataaaacctactgccttacacctatgagggcaataatgtcctgattccaagggggaaaaaagttccatgaactcccagtgaacatacagtgcattttgtttttgttttgttcccgttgtggaggttgggggtgggcacaacagcatttcactatgtaactcaggctgttacgtgaactcaatatcctttttgctttcagcctcctgagtcttgatatgattgtgtatatccatgcctggcaacacaagatttgaaaagttttaacagatacttatggcaagttctcttacatgggcaggtaacattcaaaaatcagtgtaattgaccatggaagtaagtagcacaggaagtcagtgctacttaccacccccaaagtcatgaccaacaatatagaaattcaaaactcagtaattgcatgctaataattcatgataaaacctaaataaaatttggattcaagggtagtttgtttacatatataaaacacttttaaaacaacaaaaacaagaccagcctggtctataagagctagttccaggacagcctccaaagtcatagagaaaccctgtctcgaaaaaaaccaaatcaaaacaaaacaaaacaaacaaacaaacaaaaaaacccaaactaacaaaatgccaggctggagagatggctcagaggttaagagcactgactgctcttccagaggtcctgagttcaattcccagcatccacatggtggctcacgaccatctgtaatgagatctggtgtcctcttatggcatgtttacatgccagaacactgtatacataaataacataccaccctgaacgcgcccgatctcgtctgacctcagaagctaagcagggttgggcctggttagtacttggatgggagactgcctgggaataccgggtgctgtaggctttttgcctggccgccgggcattggtgtcacacgcctttagttccagcactcgggaggcagaggctggcggatctctgtgagttcgaggccagcctggtctccagagcgagtgccaggataggctcaaaagctacacagagaaaccctgtctcgaaaaaccaaaaaacaaaaccaaatacatcttaaacaccaaaaacctagcaaataacattccatatagtgaattcatgtgttcttcctagcttcaattcaggatgccatttttttctaaatatctaatgggtttatagttagtgccgtaggacaaaaagagaaaaatgtaagaattaaaattcatcaggggttagggtgtacctcagggatagagagtgtacttagcatgtatagggctctggttcagtccccagtactgaaagctggagatgatgtagggaattcaaaacatctaaaaagtttcctcttcctgcccaagcctccccaagtactggcatcataggtacttgtcaccagggtttgacagattttttttgttttcttggtgttgctagggattcaaacccagggtgaatgttaggcaaacatgctgtcaccaaggtacatatggagcctttgtctttctttctttctttctttctttctttctttctttctttctttctttctttctttctttctttctttttaaagatttatttattatgtatacagtgttctgcctgcatatattcctgcacaacagaagatggcaccagatcacataacggatggttgtgagccaccatttggttgctgggaattgagctcaggacctctggaagagcaaccagtgctcttaacctctgagccatctctccagcctggagcctttgtatgtctatgttgacatacagaacttgaagtagaaatataaattacaatagtgtctggaaaatcttaggaatacacgtgacaaaaagctcttgaaactcaaacaataaaaactaaacacatttttgagagaaattaataaagacaaattggggggggcagggtagatatggtactcatggatggaatacttatgaaaatgtcaggtctccacccccaaatggcttgtcaagtccaatactttcttttttaatggtagggacagggtagaagttttatgaaaaactggttcaaaaattttaactgcaggagacatagaaaataaaacagtacatttgttgagacactactgaagtcagaagagtgattttggcataaaaacagacacatgtctgaaattgtgtgccttccagaagcaaacctgcgctttctggttgcttgggttttgacaaaggtattgtggactgatgtctttggggctgtgatcagaactagccaaacaaccccgagtctgaccctgagtggggagtgtggatgagggaaagctagctatgcaacagtgttaaagatgagacagagacctctggttatgtcaggagggctatcagtttgatgcatgggatctaggcagtgaaagagactgacttcctgtaagttgtcatttgacctccacttgtgtactgtggcatgtgtacacttccttctcccattacatacataagtgcaccactaccaccagagatttcttttattgacacaaaaattttaaatcataaaaagcatcaatagataccaaaattcacagcttttatcttcaacaaatggtgctggcataactggatgtcgacatgtagaagactgcagatagatccatatctatcaccatgcgcaaaactcaagtccaaatggatcaaagacctcaacataaaaccaacaacactgaacctcaaataagagatagcgggaagaagccttgaacacattggcacaggagaccacttcctaaatataacaccggtagcacagacactgagagcaacaatgaataaatgggaccttctgaaactgagaagcttctgtaaagcaaaggacatgatcaatacgacaaaacatatagaatgggaaaagatctctatcaaccctacatctgatagaggactgatctaaaaaatctagaaagaactcaagaaactagacatcaaaagactaagtaatccaataaaattggggtacagatctaaaaagagtactgttacgataacttccggccagcctggtcccagtgcctcaccaaccccaaataacacacagagactctattagttacattgctgttggcttcttattggctagctctgtcttaagtattaatctataactactaatatatgtatttctacaaggtcatatcttactgagaatgccatactcatgcgtcctcttcctcccaggatcacatggcaactccctactacatttcccagaatcctcctctcctagtcctgcctatcttgcttccctattggccaacagtattgtattcatcaaccaataagagacatatttacagaatgacttcccccatcatatcctcttttctgtctaaataaaaggttttttaactttaccatagtcaaattaatataacaaattatatataacagttgtcaagtaagaactatagttacaatatttaatccattgacatttagcaagatttaaagaaaatattctatcatctatctttgtgagtctaaagtcttatatgcaacttattttttatcatcataactataactgtcttcaactccatcgaagaccacggaaggataatatacactctagaattgacagagacaatttgctgcctggtcagtcacccaaagttcttctataatgttagagcatccatcttcagcccatagggcataatgtgtctggcagacttctcagcaaagcaggaaatttgaaactgtccaatctgtattggcagtttatcattcatttttctgtgtgtcctgcagaatgtctggcagacttttccacgaagcaggaacccttcaggactgttttgttttgcaagttcagcagttactttcctgtaggtcctgcatgtccagtttatcaaacagtccagcaagagcagtttcttgcccaaatggctaatcttgccatgttgaaggcaaactccatattgagtttcttcggtgcccatcctcctttctgatgtaattagtgtgccaggaacagttttgtctcactgtcatgaaaaaccctaaaccattttaaatgccatattctgaaggtctttgaaaggtttgaagaatgtccatttgaaatatttctttatatctagaaaatgtaacataagttttactatttatggtgactatcatcttacttagttatacattatatatttttttctgcactatgtgggctacattaggaatgcttgattcaaagggaaagacattctagtgactcagcatcttacttggtaacatgcaacactgatgagagctccagatgccttctccccttcagtgttttttttttttttcaccattttttatttaaattagaaacaagattgttttacatgtcaatccctgttccctctccctccccttctcccctgccccccactaacaccctacctctctcataccatttctgttcctcagggagagtgaggccctccatggggaggggttcttcagagtctgtcatatactttgggatagggcctagaccctcccccatgtttagtactgatctactacaagggggcccatatatttccgaggcctcctcactgacacccacattcatggggtctgggtcagttccatgctggtttcccagctatcagtctgaggaccaagagccagccccccccccccccccgcttgttcaggtcagctgtttctgtgagtttcaccagcctggttttgactcctttgcttatccctcctcctcttctgaactggattccagttcagttcagtgtttagctgtgggtatctgcttctacttcaattgacagctggatgaaggctgtaggatggcatataagttagccgtcaatctcattatcaggggagggcatttaaggtagcctctccactgttgcttagattgttagttggtctcatccttgtagatctctggacatttccctagtgcctgatttctctttaaacctataatgtctccctctcttatggtatctcttattttgctctcctctattcttccccctacacaaccttcctgctcccttatgtcttcctcacccctcctcttctccccttctcattctcctagctccctctccccccaccccccatgctcccatctctgggggaccatgtatgtctctcttagagtcctccttgtttcctggcttatctggcggtgtggattgtaggctggtaatcctttgctctatgtgtaaaatccctatatgagtgagtgcataccatgtttgtctttttgtgactgtgttaccttgctcattatggtttcttctagttccatccatttgcctgtgaatttcaagattccattgtttttttccgctgagtactactccattgtgtaaatgtaccacattttctctatccattcttctggtgaggggcatctaggttgcttccaggttctggctattacaaacaatgctgccaggaacatagttgaacagatgtccttgttgtatgaatgtgtttcttttgggcagatgcctaagagtggaattgctggatcttgtggtagactgattcccattttcctgaggaattgccatactgattttcaaagtggctgtaggagtttgcactctcaccagcagtggaggagtgttcccccttttccacatcctctccagcataaactgtcattgcaaatcaaaacaactctgagatgccatcttactcctgtcagaatggctaaaattagaaacaccaatgataacttatacattacatttttttgcagatttttttaatttgaattagaaacaatattgttttacatgtcaatcccagttccctctccccccccaccttccctaccactccccctccaactaaaaccctacctatcacatatcctttttgctccccagggagggtgaggccttccatagggggtcatcagagtctatcatatcctttgggatagggcctaggtctacccccatgtgtcttggctcagggagtatccctctatgtgggatgggctcccaaagtccactcctatgctaggaataagtactgatgtactacaggaggtcccatagatttccaaggtctcctcactgacacccacgttcatggggtatcagtctgggggaccaagagctccccattgttcaggtcagctgtttctgtgggtttcaacggagctgcataaacataatagctaaacaagacgagaaatatacatataacacaattgaccttaaagttttataaacaaatgaaaatcattaacaatacaaagtattcatttctgtatcatattccctttttttccccataaaaagagattgactgtgatcattaccatttctaaccaatcccatttaaatgaaaacacatttataaacaatatttgggaatgtgggctttgttttctcctgctgttcaggggcaatgtcatggagatcctaagaaacccagaaatcctgggtgtagtggtctgaaaggctgccttgtcccagctgtttggaatgttggatcacctgggccattgcttcaaggggtcttgcttcatcaaaccgtattagtctggaaggaatccacagcttttcattttctgtggaaacacaaataaaaatatcttttccaaagtaacatgtccttaaattttgaagtcaagacacctttaaagtatataagctgaattaacccagcagcatttataattaaatacccgttagcagcttttgctttcttcagcaaccaaaaaattcaaagataacacaataacatacagtatccagactctctgtgtattttccatctttacgtggctttttaatttatttattattaatactctatttcttttactttttgctgttgtgagacagtgtttctgtgtactttggctgcccttgaactcactcagtacaccaggctggtcttgaactcacagagatctgcttgcttctgtctcttgagtgctgggattaaaggcatgtgccaccacaccatgtactctatttctttcttgtttttttttttttaatcactttatcctgtttccttttctctcccaagcctacgaatattttaaacacactgtaaacctttagaggtttttcttcatctgaatctgtctttactgtaaatctttacctttttctgacaacatgtcttttatctgctaaacaacattgctgtcttcccaacatggcgggggtaagtttaccaccagcactgggagctgtgctcatggccttgactcttaaacctttatgaataagagctaaatctgtcttgcagtgtgctggtcattgctgcctccagcttctcttacacaccattcagttgttagcagggcttcttaaaagagtcttgcagttttttgctgcttatgtcgagtcaggaatactcctgtaaaggagcctcgtcttgcttgtctctaggaaaacagaaactgaccgagaaaatcctgctaccaagaagccatgcttgtctttattgttttgtttttaaaatccccttttaagcttttgttattctacatggaaattcctgccccacattgggggtgccgttatataacatgagtttactttggtctggctagatcccactgcccttctctgccccaaagaaacatgcaaacattatattagttataaatactgttggtctttggctaaggtttcttatttcctagctcagcactaattatctagtaatccatgtatttccatgtggccttatcttactggagaaaagatccgggcctcttaaactcctttggggtctacattgcatctgctcagcatctccgcagagaagagagagaagagagcgatttcctgcttgtccctgcttattttctgattctgcctgctacatcacttcctgcctggatcacatggagacctctttactacatttcccagaatcctcctctcctagttccacctatcttgcttccctattggccaacaaacaataagagggacacatttatagaatgacttcccctatcagagtactctcaacagaagaatctcaaatggctgaaagacacttaaggaattgctcaacatccttagtcgttagagaaatgcaaatgaaaacaactctgagataccatattacacctgtcagaatgactaaaatcaaaaactcaaatgacagcttgtactggagaggatgttgaataaagggaacactcctcccctgctggtgggagtgcaaacttgtatagccactttggaaatcagtatgccagtttctcagaaaactggaaatcgatttacctcaagactcagcaatattacttttaggcatatacccaaaggatgtacattcacaccacaagaacacttacccgactatgttcctagcagcattatttgtaatagccagaacctagaatcaacctagatgccctgaactgaagaatggataaggaaaatgtggtacatttacacaatggagtactactccgcagcaaaatgaatgacatcttgaaattcggaggcaaatggatggaactagaaaaagacatcccaagtgaggtaacccagacccagaaagacaaataaaatatgtactcactcataagtggatattagtcataaagcaatggacaaccagcctacaggtcacgaccccagagaacctagaggaccctaagacagacatacatagatctgtctaggaaggggcgatagacaagatctcctgagtaaattgggagggggaggggagggaaatgggggaaaatgtatagcttaatttaaaaaaatggcaaaaaaaaaggacaggaagaaaatgcacagtttttgctttttaaagtcagtgccgtttttctattttaattcatcctggtaagagatgaggtaaacattcagcacacacacacacacacacacacacacacacacacacacacacacacacacacacacagagttgtgttgcccagaagaaccctaatgtgttatccttatgctattcaaacatactattaccaacaccaagtacaccagcagcccctttctctaatagtatcataatttcagtgtatagatataagagaattacccattgtatatatgaaatcataagacatttgcttgtaactcaggtagtaagccaggtcagggccctttcattcaagtgtttgcatccatccatccattatataggtgcctggactctaaggcacaggaatggttgcatagcaatgaagacaaaaccaaggctggatagtctccaacagaagccattgcatttggaattctgggcgggaaagatggctcactgggtaaagactccaggctgctaagcctgatgacccaagctcaatctctgggacccacatggtggaaagagagaaccaacccccaaaagttgtcctctgatgtccacatgcacacaggggtatgagtgtgtacaaatgtgtaccaaataaaatgtaattcatgaaatttagaacttttaagttgtgatctaggtcatatattatagaagatggtgtttcaaatgtttgcagatatttcattctgttttattgggacaagtaggttgtaatataaagacaaagataacacaagacaagtgggggggggctaagatcatgagaaactcaaacacagacacacacacatagaacccataaaaactgaaaattggaaaccatgatattccagcaaaagaccaataagggtttttttttcaatcccaaggaaagcaatatgagaaaaaaatatatatccaaaaatacctttgagttccttttgtattcgccatctactgctggacactgcgctgcccataagttgtacccagtgagactgttgaagaaacaaatttttcctttgtgagtggctgttaattagaaagtttcttggttggggattggaactcatgtttacttccctatctcagtgcttggactcccatacagtttgatctgtgtaggcccaatgcatactgccacagtctctgtgagtttatatatgtgccagtcctgttgtgactgaaagacactgtttctttggtgtcttctgtcccttctggctcgtagaaatctttgctccacctctttttctataaaagccccctgaaccttgaatggaggaatttgatgaagaaatcccatatagaaccaagtgttctgaagtctttcactctgcacattgtccagctgtgggtcttctcattagttcccatctactgcaggaagaagcttctctgatgataactgctggagcctggtctatgggtgaagaggtcacaggaggaagggttgctaagaaacctgactatggaatgtttgctgtcagctattcttgttagcccaggttctgcttgtttttggaagcggggaggtagatgcctgtctgctaattgctggtggtaaggttgtaaatatcacccagcccaggagataactgacagacactgtgctctgtaaccctatgccctgtcttatctcactcaaatgtatctggcttaaaatatatagttactgctttaccctgtactttgtatgatcttaaataaccatggagactctgaaatttgtggccttcaaccttatggtatgctcccccccttttttttcgatgcaaaagcaatgagtcttttattgcagttgtttaacgagctaaccccatgttagtttgggcctttcatccacccaccacgacggatggctggggaaagaccccgagaaaccacggggcagagatcttagaggacagcataaggggagtgtctaggggtatgcacaggctcaggattggtgtgccaccaggcttggaggacttgccctgggctgattggtcaactggttgttatggctcgtaggcccacccagggcagttgctatgttctgtacgtctctgctgtgcacttgtccgtaaagtacacgcagagccataaagcatagccctgctagctaacttctgtttagttccttgccacaaggcaggcataggaccttagtgaccaaggcaaggtcaggcaagcacatgttaggctgttatggctgccaaaacggggagctggtcccgtcattccctgcttctcgaagtacccatgagaggactcaatcttgagtcctgcctgttagggcctcaaaggggtgttaacaggccctgccattagatggccgattttttctgaggtagtgacattggcatcccctatgtaagggagtttctttttgatttagcatttcaaccagagaaaatggacgatgtattctttcccatgctacttcctgctgactttgggacacagttagggacccaagaaggctgaaatgctagtcaaaagcaaaaagggaattcaggtaatggggaggcagctggttggcagactctgttgaagagacagagagtgtccacatcagctggactggttcacatccacagcaagtccagggcttgcagtccctcaggggcaggctgtagtcagcaaccgatactcagatgtgtctgccagaagcagaaacctgtttaagacatgtttaaactgggaacagaagttaaaacttatttactgaaacccacagtgcagaaaaagtagatatctggatatctgtttaaacagcagaaacatatttataactttgagtcctagcaaaaactacagatttgggctagaagcatgtacatttctcttctgtccagagagccaggtatgggttggacagaggtgcctttggcctgatgaaaatccctttaagtttatatttagatgacaaccagaataaacctaaaaaccttgagcttgtgactggacagtaggtagttactactatattagctaccaagctgactatagtcttgtggatctgactgcctgatgctgccaagctgacaaccattaatattttagagatctgagaacggtaaattttatacagtttccaaatctattaaagagtgacaggggccagtccctatacagttacccaccacacccaagtttctttattagcattggaggcagaagtctcaaagatcagcaatcttcgccaggcctataaggtgagagttttctttctctctctggaagagggacatggaaaagactgaccttgttttgtctaggcaaagaggatgcaaccaattttccagtatccagcagttttgtccacattctgggccaggtcctggcaggcagcaagtgctgcatctgagcatctcgatcactggcccttaacaagggattggggcgtcccctcaatcccctcctctaaattcttttaggcctaattacagattttgatagcgaacccaacataggacctttacatttacaccgtcaacaaaaacagcagacatgaaacacaaaactgacacagaacatacagctcaggatctgccaagccagcactgaaaagcaggcaggcagactgtgaattgcaacagatcagatttaaaaaaaaaaaaaaaaaaaaaacctgcttaactggtcagtcacacagcctgtgtccaatcttccaggcttcacagaaaccatacaaaaacaaagacagaaaaaagaaagttaccttgtgtaactcaacaaaagggggtgttgtggtggattttggggatcctgaatgagcccccaaatgttgtgcccaaattctgaacctccaaatcaccaacgggcctgttttgatgcaaaagcaatgagtattttattgcagttgtttaacgatctaatcccattagcttgggcctttcattcacccaccatggtggatggctggggaaagacaatggtatgccccttttaaagtttctcattttggctggttggcatctcatttccctgccatggagtgagatccaagctggccagcttgaacagtaaaaagaaaccttttgcttttgcatcagaagtgtcaactccttgggttagtctctgggattctgaaaacctggcacaacaagagttctactgctgtgaagagcaccatgaatgtagatggatttttctttgggctgccagctctctctgtctctctctctcacacacaaaatgacacggagacttattaattatgaaagcttggctttagcttaggcttgtcccgttatctcttatagcttaaattaacccatatttttaaatctacatacttttatgtagcttggttacgtttattctgtattacccatcctgcttcctcaacgtctggctggcaactgtctttcttctcagatctctctctggccagaagttctgcctatacctcctgcctatacctattgaccgttcagctctttattaaaccaatcacagtgacacatcttcacacagtgtaaaggactattccacaacacatgaccacagcaacacttataaaggaaaacatttcattgaagtggcagcttacagttccagaggttcagcccacaatcacggaggagagcatggctgcatgcagacagacacggtgctggctgcatcttgaccagaaggcaacaggaagtggcctgttaaactgagagaagcttcagcaagagacctcaaagcctacctaccctggccagcaggacagcaatgagaaactgaacctcaaaagacctggaatgaatagggagggacaagagacaacgagaacgacagcaagacaggatttctgatcaagctgcaaaaattttatttttctcacagaccttacagcggggaaagcttggtggggcagggattcctcagggagaggtctttgcctggtatgtgtgagtccttgaaggtagacaggataacagggagggccagcagagaggtacaaataaagcctcgagttctgtagagcccataatttctattgccttttagatgtcagctaatggctgctagatatcctggcctaggtggagaatggctcctattctaaataacaatagccctgggccagggtgagtctacagcctccctgaaggccacgagatgtgctggtgttgagtgcctgagggcttgaatatgtgctgaaaaggagtatctctcggattaagggaaatatttgccatcagctctttatacatgacaacagatgtcttctgccattgctcccacctttggatggttacttaagatgatctatcaataaactgtggccttcagtattaacctcctgatagccctcctgatatgaccagatgtctctgtctcatctttaatgtcactgaagagttaaccttccctcatccactctcctccactcagggtcgaacccgaggctgtttggctggttttgatcacagccccaaagacatcagttcctgataaatggcccctgcaatgtggggctaatacagacctgacctgatacatatttttatgcatttattttgtatgtatatatgtgggcacacctgtgtggtgacacactagtggaggtcagacgacaacttgtaggagggaggatcaaactccaattgtcaagcagctgaggcacctccttaccttggtaaggattagttatccttatccagaaatagactttttcatgccaaaccacccaggactcctaatatacaatgtgctagatggtgtgtcttgagctgccttctttcccaggctactgctgtaatcttaatccacaaggatggccatctgtagaagtccagcattttcttaggagctatttttcttacagtgtaggtgaaagacccccgaagggagaccctcgctcaaatctcgggaatagagcgcacccagtgaggcaccgagttgcggcgaaggcgcaacttaagaggattatcactggcggccactgtccaattatttttgcggttgttttcatttttgactgggtgccctttttatgtgggaagcgtggatccaggcagcaatcccgtctacctttactgccgtgggcgtggtcagcagcactaggtagggtcctttccaccgaggctcaagtgtgccagcacgatgtcgtctgaccaagactgagtctccgacctggaatcggtggggcacctcggtggtccctggagtgtaggcttctttgatctgatcccagatctgtgttttgacaacttctaaggcctttaagtgggtaaacagagcagaggaggagggagagtgagtgcaaggatccaatatcccacctgactcagtcgaggggggcggtcccccatgtaggatttcgtaagggttaaggccgaaagtccaggtgtgtttcggaccctaaggagcgcaaaggggaggagggtcacccagtctttgctgccggtctcaatagccaatttagtaagggtctcttttagggttctattcattctttctacctgtcctgagctctggggtctgtaagcgcaatataatttccaattagtccccagttgggtggccaactcctgacttacctgggcaacaaaagccggccccttgtctgaaccaattaccttggggatcccaaacctgggcaggatttcttccagtatcttcttggttaccatttgagcagtttcggacttcgtgggaaaggcttccacccatcctgaaaaagtgtctataaaaactagaaggtacttattaccatattttcctggcttaatttcagtgaagtctacctcccaataaattcccggccgatctcccctcattctttttccgggttctttgaacggtcgggcagcattggtcaaggtgcaggcttgacatgactctgttacttcttttattattgtatttaatcctagaacataatatttagaacctttgattaattgcttaagtttttcgtttccaagatgagtcagctggtgtattcgtctcacatagtcttgtccttctttagagggtagaatgattcttccatctttggtttttgccagttcaccgaaactgaacatccgagcttttcttgcacgggtcatatctttgattaaatcataatctttatagggatagacgaagctgggatggatgacgctggcttgtgggggttctggcggggttccagtttcttccgccagcactaccgctccctgggcagcttgctttgctgttagatcagccatctggttcccctttgtgactgggtcagcccccttctggtgtcccaggcagtggacgatggctaatttttgtggaagatgtatggcttctaggagggccaggatttcttctttgtttttaacgtctcttcctgctgaggtgagtaagcccctctgtctgtaaatggctccatgaatgtgagccgtggcgaaggcatagcggctgtcggtgtaaatgttgatagccttaccttctgccagacgcagagcttgagtcaatgccaggagctcagctttttgagccgaggttccttctgggagactgctagcccaaattacctgctttccatccaccaccgccgctcccgcccttcttttaccttctaccacaaagctgctgccgtctgtataccagtttgtcacacccggccaaggttggtcggtcaggtccttcctggtcccggtctcttcagccaggacgtcagtgcaccggtgcactggggtagagtccttcgcttcggggagcagggtggctgggttaagaatagcaggaggagcgaaggttatccgatcatttaacaacaagctctggtaatgtgtcatctgggcgtttgtcatccagccgtcaggcggctgccgcacaattctttctaaagcatgtggtgcgattacagtcatatgctgacccagggtaagcttatcagcgtcttttacaagtaaggctactgcagcaatggctttcaagcaagagggccacccgctggcaatggggtctagctttttagataggtaggccaccggccgcttccagggccccagggcctgagtcagaactccacgggctactccagcccgttcgtcaacatatagagtgaaaggcttagtcaggtctggcagggtcaactcgggagctgtgagcagggcagtctttattttatcgaaggccctttggtgctcctccgtccaggtgaatgggactttttctttagtgagtgggtacagaggggctgccagggtggcgaaccccggtatccagagtctacagaaacccgcagttcccaaaaactcacgtacttgtctcggagtggtgggggtcgggatctgcatcacagtcttcttccgtgcttcagtgagccaccgctttccttctcggagagtgtatcctaggtaggtcacttccgagcggcataactgggctttcttggcggacacccggtaccccaactcacccaattcctttaggagctttctggtcccgtcgaggcacagttcctgggtcgaggctgcgagcagtaaatcgtctacatactgcaagagagaaatctgggggttccgtgccctgaagggtgcaaggtcacggtggagtgcttcatcgaaaagagtcggtgaatttttgaacccctgtggcaacctagtccaggtcagttgacccgtatgtcctccttcgggatctcgccattcgaaagcgaataggggttggctattcggatgtaacctgagacacaaaaaggcatctttcaaatccagaacagtgtaccaggatcgttcaggcggtaaggaactcagcaagttgtaagggttggacacggttgggtgaatgtcctgtactcgtttattgacttctctcaagtcctggacaggtcgataatcattggttccaggcttacgtaccggcaggaggggggtattccaaggggaccggcagggaatcagtataccttgttgtaacagtctctggatatgtggtcgaatgccttctttagccccttgagtcatggggtactgtctgactgatacgggggtggcagccgcttttagttccactataaccggtggtatttgcttagccagccccattccagtccgctctgcccaaacctctggaaaagctgtcagccattctttagggggcaaaaccccagttttgggttcatggaggcgatattcttcttctagacttagaactaagcatgttgtaggggcttccccccaggtgacttctggtcccttcggggtgaactggacctgagcctttaatttggtcaacaagtcccttcccagaaggggcgcagggcactcaggaatcacaaggaaagagtgagttacttggctttttccaatttctaaacttctttcggttgtccaagggtaaagtttgctcccagtcgcccccatgaccagggttttttttccgatcctaacggccctaaaggtttagtcaaaactgagtgttccgcccccctatatactaagaaattaatggggtttccccccacagagagagttaccctaggctcggggagggggaccgagccccgactcccctaatcttcctcgagggccaacatcttggggcccttttgtttctttcgggggcaatctctggcccagtgtccgttttctttacagtatgcacattggtctttttcaagttgcagtctctgtcctcccgggggtcttcttgccctgttgcccaggtaacctgactgtcctctttctgaccgttctccgcctactactgcggccaaaatcttagttaaattcctctcctggcggcgatcctgccgattctccctctcttctgcctccttttttttttttcttgtttttcttcctcggtctctctcttgtgatacactttctctgcctcttttactaaatcctgcaatgtataatcctggagcccctctaatctttgcaactttttcttgatatccgaggccaactgtcctataaaagccatggctacagccgcctgctgtccctccgaggagggatcaaatggagtatgtctcctatatgcctccatcagttgttctaagaagacagagggtggctctactggaccctgtaagatttctcttacctttgccaaattggtgggtcgccgcgcggcccccttgagacctgccactagagcccagcggtagaccgtgagacgccccctaccttccgcagagttgtaatcccagtcagggcggaccaagggaaaagaggcatctatgagattagggagattggtggggggtcccatctggtcctggaacattctttctggcctctagaaggatcctgtctctttcttcagtcgtaaagaggacctgcaagagctgttgacagtcatcccaagtgggctgatgagaatacatcagggactcgaggagtcccatcaagcctgaggggttctctgaaaaggaggggtggttagttttccagttgtacatatccgctgacgaaaacggccaatactgcagggggactaattcccctggagctggggcggggtccataagctcgtaatggtagctcaacggtggaatcaggtcccacgccagatccctctgggctgcggcccggcggctttgagtcccggcctcgggccctatttcggaggccggctgggagtccgttgggacctgtggggctgcatgagaaacgggttgaggatatgggggaggagggtggtcaaggagggagacatcatcaatttcaggatagatctgcggaggagctgttggagcgggcgccggcgaatctgaaggaggcactttccgtgcctccacggcaactgtcgcagtccctattcccgatgttcaaggcttcatccagggtggcgggttttggactaggtcctgccacacgatattgtatggaacctgatcagggtgtccccttgtggcctgaaaaataattcgcttgacagcgtattatttttaataatatttttaataaatctaacagatagattaaaagttccccctgaaggccatcctacaccgaaacttggccattcggaagaacaaaaagtccaccaaggtccttttctgacctcgacagaaagattatgagcccgagtcttaacgtccgtccagtggtccagggtcagtgttagtggggtcgtcacagtctgtcccatgtctacctctattacatacacgataaaaacaatcaccacgacagaaagacaaggaagcaaagcgagctgtcgacctcgagtcgaccagtaattctgaaaggaatcaggcggccgggaaatggccctatgacatagatcgtcaaggagaaaacttatctcccgaccttctccgtggaggtccaccaggcgtccctggtcctcctcctgtcctcccgggacgtctcccagggcgaacaaacggtggacacctggacacgtctatccccgtccactccgctcctccccctggagagtggcctctaaagagcatttgcgaaaacgtaactgtgatcgcaccagatttttgaacaggccacaaacaaagagtcacaacagaacaaaaattcttacctccaagtgggtctaggacccctgggtggttgtgcaaatcccggacgagcccccaaatgaaagacctcccgaagggagaccctcgctcaaatctcgggaatagcgcacacccagtgaggcaccgagaccggacttgctgcaatcacacgaggaagtttattgaaaaaggaattgaatgagatctcaagccagcatgctggggtcgaggctcagaggagttcgaccctgacccaaacttgtgacaagcttataaaggcaaaaaccataaaggaggggagggggactagggaggaaatagaggaagcccaaagttacacattcactcataaaggcaaaaaccacaaaggaggaggggaggaccagggaggaaataggggaagcccaaagttacacatttactcatcagttaaactatgtggacacacctggggtgtttgaacttttcacagaggtcgttgagacatcctgtggttattccaggagcgtttttttttttttttttttttttttttttttttttatgagagttccaggagcggccacctgcagggagggagcccccaaggtgacaagcccatgttcttatagacaggtagtaatttttactcttcataggtacaggggaacctaggccacgtgtagctactccagtgagaccttcatctccatgcagaatggaagcctgtattccccagtctggctctgttgttccaatgtggtctgaggtcattctgctgagttcccagaatggaatgcttctttttctgattagccctacatacgaggctgaagattgactattactccttctcacaggcagttttgagtttctggtcataggtgctgcaaattgaactgaggttctcgggaaggacaggatgtgcaatgagcaatgtcttcagccccttcaatggcacttctttctttgagcacaaagctatgtctaatgtgcaattcctacactagaatatctgggtctacttgcctccaaagttttgcttcaagtcataaaacaaaacaaaacaaaacaattcttcaccattcaaactattgcaaaagcatcaaaccatcactagaaagtttaatccacatatgtgcacagtcatctgcagaaatcacgctgtgagattttagtatagacactctggactaaagctcagatctgtactgtagtgggaaatgaactcataagcttttcatattgcctatccttgtaaatatacaatgcataattctgattcccagatgatctacctaaatgataagaaggaaagtaggggagaagtaacaacttttgggttattaaaatattaattttataataataattttattgctggctaattattaatggcctgtcttgctttgtgacttgctaaagacattgggatccattttattgaagctgttggtcattactgcagttacaaaaaatttggtctttgtcttttcagtagattgggtaaataaaaaacctcctttgaggatttctatttcagtatagggagctctcagagaaatcccaaaccacctcctgcaatgctaacaaggactgcagggtcacaaatgtggacgttatgagaaacagggacatgtaggcctggcatcagaagtagaaattaggactgcattggagaggctagtgtgaactattgaaccaaaatggctatcactgaggcaaagggattgcacgtttagtcatatttcagatgatataaataggatctgacagaggaagccagttagcgggtgatacttgagtctagctttgcttccatctgcagctcctggtttgaagagattaattttgaacagatgagctatcatgttaagtgtccgttggggactgagtgcccttgaatttgaatggtgcggttccacctttttttcatgtgtgctcttgttcactgagctgaaatcttcatgcaggaaggtgagcacagtggcaacacagtatagaaattgtgttcattttggtttactgttggtactgaaacttacctacctttagccaggtggtggtggcacatgctttaattgcagcaatcgagtcaggcagattttcatgacttcgaggccagccaggtctacagagtaagttctgggatagccactgctacacagagaaaccctgtcttgaaaaaccttaaaaatagagaaaagaggctgcagaggctatggggcaggtcccaccacaatgagcaagtatgtggtggggaaatgggagtgaaagaagcagagtggttcgagcactatgaaaaggggaggaacaggagacaccaagaccacgaggagcagccggatgtgagaggcccgtactgtcccctgaagccttgctgatatctggaaccatgctgccactgagggccatgtctgggttcatgacctttctgcagcaggagtctgtgtcggtgtccgcggtcatttcaccaccaaagacccatgtgaccctgcttggtctgggctgccatctgaggacatgttgatgtcagtacagaactgagctggaccaggccctcactgaccacagaaatggtcacagaagggatgactccaccccttgttggccttggcactccagagagctggttttgccacttccctgggcagcaagggagagttggccttggtaatgtgggtacaagagagctggttgcacacctccctggctgaggcacttgggagaactggccctcacctctcttgggcagtggggaagagctggccatggtagcgtgggtgcaggagagctcgccccaatagcatatgtacaggagagttggctctgttcctttccagctgtggcactttgaagagctggtcctgtacctctccttagcagggcaggagagctggccctggagctgtgggcatgggagagctggcaggctggccaactcactgcccccaggcacggatccagggctttcagctgggccaccccaacacctaccccatctgtgagcagctggagcactcgtaggggctggtcctgcagaaccaaagctgaaggatctccatgactcagggcaacagcagaatgtcctggaggagtctccgtgagtgtccagtgttgacagtgtagcagaagccagaagcctcaaaccagaccaatgactcattgcatttggacaaaagggtatactgtgtgacaccataataccctgcagcttcaacagtgagattttttattttaattttctgtttccattgggggggaaggttacaagggtggagggtggatatggaaggaccaggaaatgagtgggactggagtgtataatgtgaattcacaaagaatcagtttaaaaattatggaaaacaagagttgtatttaagtaagattgtctttgtaaataaacttaatgtcaaagatttatttttattatttcaaagttatgtggttctgtgcacatgagtttcaggtgcctgcagaaggcagaaatatcagatctccctggagctggtgttacaatttgttgggtgcctcccaaagtgtgtatgggaactgaatttaggtcgcctgcaagagcaacatgaattcttgccagatgtggtggtgcaaacctctagtcccagcattccccaggtgtaggcaggtggatatctgtgagttctagccaaagctacatagaccctgtctaaagagaaaaaaatgaagaaatatatgctcttaactgctaattcctctatccagcccatggtcacacttgaaaatggcaatttgtactcccataatcattcatatctttatttattaggccctctccagtttgttacacaaacacaagaagcatatctttgactcttgaagaaacaccaataatgatgttggcatcaggtggcagagatgctcagacagctgtggtgtcagggaaggagagagtcttgcagatgtagaaagtcatagggtacagggaatcttcggtgcctagggagatggatatgtttttatagagtaactgttttcctctggtgaaaaaaaaaaacagacagaaaagcaccttcaagaaggaagggctaatttttctagtcatttcagtgggttctaagtttcatctggcagagaggacagacagtgcacgctatagtgaaccaggaagcagccaaagtgtaaggaggtcgagtttttctttctccacttcgattccatccagaccattccatctggagtatcgactgatgttacctggattctgggtctgacttcctctcttggttattgtcacacagtccttttgggagatgaccttacttcatgcacatgaggtggctaatactgacttgagtgaccttttagaacaatgagaccgacacaagcagaagacaagagcttgtgctatcaaaactcctggtcattgatcaccctgctggggggacacagcggctatcatgtacagccctagaccctcaagttttcaggctccacaacagtgaataacagaaagtggatccagcagttgatgtacacactgacatgaggttctgggtcatcaaactccagggttagcctcagtcaatgtgatctcctgctagtcaggtaggagctctctctcccaaaatacttccctgagcctcctaccacctggactcttcagtgtgtcagtgtctagccccactgacctccataacttcttccatcaggctctcaaattcttgtgcttacggaagacctaattgagactctgtagtttgtagtgctttcttgttctcaggttctgaggctagctcaagttttaacaacatcttgtctctgaggtgatgtttggcctgtaagtttcaggtcattacagagtgacatgtgatttctcaaccgatggaagactcagggtcttccccaaacccacaactggatttgaggcttctgatggttgtggccttgtctttgtaagcaagggacatggtaaagaagccactgagatggttgctctatggttagggggaaggttttattttaggtaagagagagaatagccagaggcaaataggagagtccagggcagagaaaaaaagaagcagattggacatggctgtagttagctttctcaatggactttctttggatctctattccttaaataatgatgtggagatttattattcattatgaaagctcggccttatcttaggcttgtttccaagaagatcttataaaacttcaattaagttgtttctattcattttcatctgtcccgtggctctttacctctcctcagttccatgcatccagcttactccacatctcgctggtaaaatgcaaacacctagattcatcccctgagttctctctggccagaagtcccacctaacctctcctgcctagctattgaccattcagctctttattaaaccagtcacagagactcatcttcacacagtgtaaacaaatgtccctcaacatttccctttcttgtctaaataaaaaggaaaggttttaactcagacacagtaaaactatatacaataagaacaattataaggctgggcggtagtggtgcatgcctttagtcccagcacttgggaggcagaggcagttagatctctgtgagttcaaggccagcctggcctacagatccagttccaggacaggtaccaaagctacagagaaaccttgtctcaaaaaacaaacaaacaaacaaaaagagcaattataaggtaagaatcatattcacaatgttcagtttattagtatttggcaaatttggagaaaatactctattatctatcctatcttggggagtctaaagttttatacctaaaccacttgctattataacttgtattaccaacctaaaatatctctttaggccttacaacattttcttagataaacaacttaagcttccatgtcttcttaacctttaaaaagtttacatctcttttgtaatctgaatttggcaacaatgaagatggtataactctagtcttcaaccccagcagataccccaaaaggctgttatatttcccgaataaacaggaagtgtagaactaacaacttccaaaactatagaaatgatagagactggtggttgcttgggcagtcacccaagtttcctttgcatctagctttggcctactggcctagaatatctgacatttttctgtgaagcaggaattttgaaggactgtcataccttgtctcagcaaagttcaacagtcatcttattttgtgctctgcttgtccagtttggacagtgtagtgtcaggagtcgaggcaaaggcagttgttcactggctaactttgtcacaatgaaagcaaattccaaatagaggtacagtgatgcccattatcttctctaaagttgattggtgctgctaggagcagatgtttctcactgtcatgaaaaaccttatgttattaaaacatcttcaatgacatattctgtaggtctctgaagtgcttgaagaccacttatatatctaaagtgtatctgtttgactttgaaaacatacctgatatgactacaaatttgattgttatagatgtctaacaactaaactgcatttcttaattatcctaaattgtttgtaataatagctttcaaggactagaagttcataccatgtttttaaatgacctgcataggtacaatgccttaaacaagagtagaaacacatatacagtatgctattacaaaaataaccttaaattgtatcaatataaaaaaacccataccaaggtaaaatatttaaaactagtagttaccttttaggttaaaagtagattcaataatctatccttttattccatattcctataaacctcctttttttcttttcagaaatagttacccaaatctaatgtcccttatttggtttttccatgaccatgaccaataacaacttgcaactaacccccctaaacatagacaaacatgtataacccatcaaatgaccaaacctaggcaccctacttcttgggaatgtggtcaccgtgttcttaaaatcgctttatgttgtatggcagtgacagcatctttaggggatgctgagaaaattgggataatgatcaagtcctgcaaaagttagctggtgtttaggcttggtgtgatgggaaagtgtagggcttatgtgaagtcctggctggaggtgagaaggcccaggaggttagtgtggagacttcaagatgcataacaagtacctgtgaatagggaatgaaggagcctgaaggccaggataggctttgatatgcaaacataggtataagttgtgaagagccatatgttcctttctggcaggcagaaaatcaacttcataggttcctgaggaatggtggctgttggcttttagcagtccttccaagtccactttaagctgagccaagactcatttctagacatatgcactgcttcatacttaacagtactgagcaatgcatactttctagttggaggatttttgcattcccattgagaaacatgccagtagatttttggtgctgctgttagtattgttgacaatgaaatatttttctccttggctgtgcaaaaataacaatttgaaggaaatctgttgattctgagatattggtttttgtattgactaactgggtgtagtcttaaatggtgaattttctttcatttggttctttcataggatttttctttttgaaagggaatttctaggaagattcatttattcatttatttatgtgtgtgctcatgtgcacacaaagcacatcagagcattatgtgaactgtgagggctaaagttatgtttgaagtttattagtgtgcttgagagatctataacaaaagtacttctaacctgtaagccccacttgcccaaggacagagaacttgctggaatgctgggggctgttgttcctgtcggataacaagccatgtgatctcactttagtaaacaaggctggttgccccaactgcacaggatgtgcttggtcacatgtaggtgagaagtatgcaggcaggaagtacatcaggatgtatgcttgcccctgattggatgaaggagggaagaaaggttttgcctttataagcacctgactaatctaactcagtgactcacctagctaccaggtatggacctggccagggttcatcttcctggccagtactaaataaaacttgctttaattagacaatcatgaatttggtcattcttttcacaattttcatgtttaacagaaccacatgtgtccagggcttgcaggggtcagaagtgggtgttggatcccttggacctggagtcttattggaaactacttgcaaaagcagcaagtgctctaactgttgagctatctctccagccctgaggagaataatgttcttctagttaccttggagtttaatgaaactaaggaaaaggtcagtaagttcagagaaggtgcaaaagccaggagaaacagagaaagatgctgtggaatattactttaactatgtaaagagtgttacatttgtttatgctgcatttgtttaattatgtgctttacttgtgacattattttcatcatttcactcaagtgcaacttgccaagagcaaaggtgatttagcagatgacagaaagaagagtgtgtactcatgtttgtacttgcacctggtggccctggatggtgttcttcaacttagagtcaagtaagggacttcacaagcaatagatgaaactcagtattggtgcacactgtttcctcactgttcagagcactactgcaattgtatttattctttattttgacctaaagcaattggcaaaggtcttctgaacaggtttccatggtaagcttgtcagcatcttaggccacataatttaactgcccttagagtggaagacctggaggacatgggaaagtacatgggccttactataggtgtgttcaagacaatggtggtttgatgtggcctgtctgcacccctgtgggtcacccaattctaagggaaagagcatcaggtgctatcaggaccagagcccccctgcactgagctaagcacttacttagtggctggtggtttagtggtgaaatcttcccctggttgcccaggtcacaaggtcatcttgaagggcattatttccctgatcagatcccagcacaaagactttgtcaagttcttccactccccacacagcaagcatggcagagcctgaggagtggccaggctcaaggactaagactaaatattcctaatgaccaagaacaggtgtgtgtcacctgatatttgtcgcaaagcctgggtggtacccagtgttcaccaccaccaccctcacttccttgtcgctgccacctgtagtccccaattacttagctttccatcaaccacctttggaatatacaaaaggacccctgactcccacagcccaaagctaagaatgtcaccatctagtacctgagacccatagtagacattccctgctttgttgtaaatggccctcctgatgtagccactaacgtttctgacaagtgtgattatgcctttccttgttttcttactacaaagtcatggaactgtttctatgttggactatggaatttggggtagcctaaatctgtgttcctggccctgtcactatttattttccccctctgagacaagagcttcattcttgtgttgatggtaccactaagccaagcacagtgctcagctctcaagatttcaatgaatgtttgctggttaaagaacatagagttgagaactctcaaacaaaatgaataaacaagcaaacacctctccccactaaatcccagaattctagggcaatggctcttggaacaaatgaaactgaggtaatatggacatttgtgatctggagggtgagtttgacttgtgaccatggcagagagtgaacactgggtttctatggccattttagtgattcatgctcctggtctggtcggggcaaggctggggcttattagagtataagtactccacagggacagttttaaagaatttttaaaaaggtgttgaagctttatgtcagtggtagagcatttgcctagcaagtgcaaggtcctgggttcagtcccccagctctgaaaaaagaaaaataagacaacataaaatagccaggcatagtggcacatagatgacaacatgcttactgcacccatcagaaaccagcgctaagaatccaaagcctagacctgcttgggcagaaagtgcctttagaccctgagcgtgtcttctctgttcaccggccatttgatatttcctgcctgctgccaaacctgcccagagttctgagttggagaaatgcaaactcagtgactggtgcagatgagagtcttgggaagttttcatctgggcatgcttgcattggttcatagcactggtgggtatgcttttattagtataatgaaattagaaggattccaagaccatctggagtattgacatgataccaggactaaacagaggcagcctggcgtccctccttttagcttgctgacgtgtgtaatactttggtaactgactgctgggagcttggggctatcaacatccaggctttaatcttttcaagcaagggccacttgataatagaacaagagattatcagctattcggcggctcagcatgatgacacactggtcagattcagttttcctcatccatcctctcaccttccagtctctagttaagtttgcatccacagcaccctttccttttagtttctgcttgtgagagaggccatgtgttacttttttttttctttctgcgtttgggttatgtgacaacacaatgtcctctaataccacttaattttctgtaaaggacatgatttcacccttttttatgggcaaacaatgtcccgtgcgtttctatggcatatttattcattcatccattgatagtcacttaccctgtataccttagttatattaatagctgcacatctttgctattgtaaatggtgctacaacaaaaacttatgtgccggtgtctctttagtatgttgatatcatttttttcttttgaaatatattcatattgggttagcaggggctgcagatacagatacattgaggctgtaagcttaatacccaactccaaaaaggaaataataataaagtatagctggatcatacggtagatctattgttagtttttccctaagattgtgtgtgtgtgtgtgtgtgtgtgtgtgtgtgtgtgtgtgtagcaacccttggagaccagaagagatggctgcagctgccattacaggtagtagttggacatccaacatgagcgttagcaaatgaaatcaggtcctctgtaagagcagcaagtgctcttaactgttccttcatctctcaaagaacctggtgacaacaatggcctagagcagcttggccaattagctctggggttctgcctgtctctgtctcgctagtgccagggttacaagtgttttcatcaccacaagtagcttcatgagagtactggagatccaaatttagccctgtcccagcttgtgcagcagacactctactgactgagctgtctccccagccctggcatttgttttgatgtaaaatatattcatgaaagatgcagaacaggtagtattgatgattgggatttttgagacatacttggatacctcctgccccacgttccaagtgttggaatctctctctctctctctctctctctctctctctctctctctcacacacacacacacacacacacacacacactcatacacacacacaaacatctttgtttttcttacagttgattccttttattctttcattatctgccttgttaaattgtccaagttagtgtttccattgtggtaaacagacaccatgatctcagcaacactttttttttatttgaattagaaacaagattgctttacatttcaatcccattaactctcctgcccctcctcctctaccttccctcctactaaaaccctacctatcatatatcctttctgctccccagggaggatgaggccttccataggcaggccatcagagtctattttatcctttgggatagggtctaggccacccccgagtgtcttggctcagggagtatgtcacctgtaccagtgccagcgaccaaagaacaggatcaggcaagagtcttcggattaagaaggatacaactcgggtcatttggtagaagctaatgccatcggtttcttgcaaccagcagcttatatataagaggagatgggaaaatcatcacctgctagcagaaaggactcccccgccctaccataaacaaggaaaccacaacactcccatgccctgccataaacaaggaaaccacaacccaggcccacgaagcaagaaggggatggaggcaaggcatactgattcaataacaagaaaggttcacaactacatgttattggggaggcttaaaaaacagaaggtaccagtggttatgctggaaaacaactcacagagaccccagtgggggctgggtcccaacaggagtatccctctaccacagcaactcttataaagaaaacatttaattaaggtgctggtttacagtttcagaggtttagtccattgtcatcatgactgggaacatggaggcttggagtatggtggcatgcaggcagagatagtgctggagaattctacaagttgatccaaagccacaggaagtggactgagacatggcagtggctttagcatatgtgagacctcaaagcccaacaccacactgacacacttcttctaacaagtccattcttacttcaacataggcacagctcctaatagtgccactccctatgagcttacgggggccaattacattcaaaccactgaacaaaacctttaagttatcacaatttccacatgtattataaaatggggtcactcatcatagagatgcatacttttcatcctggcactcaagaggctgagacagatgaatctctgtgaactggaggccagccttgtctacttaacaagttccaggcctgcccaggctatgtaatgagaccttgtcttaaaaataaagtaaaacaaaaaaccaaaagccttcagccttcccatttcaccaaagtcttccagttttctcctgtagtcatctgtactggttgtccctcagagctgctgcctgctctctcgtcaaggcctctggattttcttgacagttggagaacctagggattggcttcccagagctatgtggtgggacttcttacataagcttctatttcttcgcttatataatcatgttctcaattctcataaccaatttccttctaagtgtaatgctgattgatatctgtttattgccaactttatttaattattgtatgtgtgtatgcggcctatgtgagtttacttgcggatgccaacagaggtcagaggtattggatcccctcaaatcagagttaaaattggttgtgagccgatcaacattgttctgggactaaactgtagactactacaaaagcagccagtgctcctaacttctgagtcacctgtccagccgtaaatttatgtttatttttcccctaaagttgccaagctgggtgtttgcagcacccacctttattcccagaactcagggggcagaggcaggcagatctctgtgagtttgaggctggcctacagagctagttccaggagagctagtgctattgcagagagacatcttgtctcaaaaaaccaagagaaaacaaaaaggaatttgccgcattattaatttcttccatggcgtgttacctctcgtccaccttgcacttcctgttcccttaccatgtctggttagcaactccatctttcttcttccaagaaaactgtgtttccctgaaagccttgtctaacctcttccggctgagctattgccattcagcttgttattaaaccaatcacaatgccacatcttcacaccctgtaaagaaatatccctcaacagggggctcacatctctcatttgtgctgggatcttgaaaagcaagcacagcactgagaactatggagatggaaggcctgtgtccatcctttcaagagctcttcctcctttgtcagcctactggaaggatgcagcagagagtcaagaggccactagaacctcagtctacaggctgtagaaccccgcctggcaggtaggtggttccatatgttgacactgtgatgaactgaggtgcaggagtatctcctaaagattccagttaggtgatgagggaaatcccagtcattgactggggatcagtttcccatggaacttcactgtctgaacagacacccctggagacttcagttttcagcctttctgtgtctagccctgctgttctccacaaatgctgcccagggcggtctctcaccctgtgacagacaggttaaattcactctcccagtgtccgagctgtcactcattcacagacccttccaggaagtccattttccaatgaggagattcctctcacaatgatacagagcccctgcactctcagtcatgttgacttgcaactgctttgggaagtccttgaaactctaggcttgtcccgagcgtaggacttgaagtcttatctcaccagggctgccgctttagttgtggaggcatctcacagctttcagtgcctccgcctggaagccattgagcggtatgagcggcttgctagcttcttttctgccccttgctatctttctctttgcactttgcaaggatcctgtcactacccttgtgaatttctgacccttgtcttctctttctgtttgtaatgaggccctttctccctctcctctcttcctctctctgagataggattttactatgtagtctgggaatgcttggaacttgctttgtagaccaggattgtctggaactcagagacctgccagcctctattttcagaaaactgagaattgggattaaaggcataggctaccacacttggaaaatttcttcacccccaccccgtatcacaagttttaataggtcttaatattaaaaactgggagtcggaatcggggcatatgctggatgatcagagaagtagaggagccagacactagagaggcttctttcctctaccgaatcctcaaactaaatgggcgatcctgtctctaggaatcctcagactgaatgcaatgagctcctgtctcctcctgcctcatattcctctctctctccggtcttatccctctggtctccacctggctagtgctgggattaaaggtgtgtgttcccaagtgctggggtcaaaggtggctgccaccactgcctggcccctaaggctaacgagtggcttagctccacactctgatcttcacacaagtttgtttgtagatcacagacaaaatatcaccatgtttctctgtttcttttctgaatctctctcacagggttgcaaggaagcagatttatgtctgccatattagccagaagttttcctgttagatttcaaattcactcccactactttgagacagtttagtggtttttcgttttttgcttttttttttttttgtggaaaaaaaggcatgtttcttttaattccccatgtcacccaaatataagtgtggagaaggagtagtttgctgtgccttttgctgtttcatgtggtttaattgtggaaaattttccttgtgtttttttttttttcttttcaattctatttttctgctatctccttaaattttgacctctgtgttcacacatggtttggataactaaccctccatttcaggtaaacattccattgtggtgggatgttagttaaagattgtgacatttgtttatgctgtggagcacttgtttgatggtacaaagacgtgttgcattcttttctgtttcattagtgtaactctgtgaaactgttactttgcttgtctaaaacacctgattggtctaataaagagctgagtggccagtagtgaggcagtacaaaggatgggcggagcttgcaggcctgagaataaataggaggagaaatttggggataaaagatcaaggaggaggagaaggaacaaggacagggagacgttaggggctagtcacacaggcagtcatggcgaaagaatgaaaggaagatatatagaagtaaagaaaggtataagcctagaggcaaaaggtagatgggataacctaagaaaagctggctagaaacgagccaaggtaaggcagggcttttataagtaataataagactctgtgagatttatttgggagctggatgatcacacccctcaaaagagcccaagagtaaaaaaacaaccaactgcattctacctcagtttctttcccactagatgcaatgtagttgcaacatcagttttacttaaacatttttggtgctgtatgcttttttaagtgttgcccgtgagtgtataacattctcagaagagttcttgctttcttttgtttgcttggtcagccataaaaggtagggattttagtaacctgaactttgtgagtggtgttcatagtgtcctttcgggcaatcacccatcagactcagggatgtggaccaagtttagagcagtagtcagtaggcatcactaaaatcattctttcctttctctgtttctctgtatcctgacatggtatgaaaccatgactactttactggggaagaaaatgtggaaatgttcagagagacataaggaaggaaattgtaaattaatatgattaggacacaaggtcacatatgttgttaacatttctttaaggaatggagaacacagtggatctcctttaacaaagcttatgacatccaaagcttttctttcagaatatggagcttgctataatagtaccatgggttggatggggaagatactgagttggagtacttaggcagcgactggcatgttgtacatgggtagcaatgagacagtttactacagtggccacaggagtggccaatgcttgttattatatgggataattttcagttatgactacagaaatgagaaacttacttgtagggcaatgcaagatgatgcttgaccagacacgagtgttcctaatgcctgatgctcaggcttggtagtcatattgagagagattatctctgtgacttattaccatcactgaaaatcaaatgttttatgaaaacacattcagtgcaacacttaggataactcaggataacaacagacagatggtaacatgcaaggagagtaatttattagtgcaagacattgaaaccttcacattgggcaaagaaattcaggttatctgtgagaagcaatggagaccaggaagagctgcgtttcaaagttcctttagtttacaatatagaacgacttctccctggaaataaatcgaaagcaagagaagaatggtgagcagaatcaggaagttcccggagaagaacagctagcacaccagtgctccatggaggagcactgcactgaggacctcacagtgttcttggggaaatactgaattgtgatggggaaattatatcaaatgatgcacattagtggaaatctttccaaattcaggcaaatacactctgaatggactcaacagtgtgtcttgattttctgtgtctctgctattaggaggcttacagagtatgtcccaagtcctcaggcataactttctatgatgatttagaattgtgaactccaccttctttccaatggggtaaccaggggaaacccagggcaaaagtgggtaagaagtattggaaagatgaggtcgcaggctcctggcagggccagcaaaggtggcagagaaatggatcctgtcagtcttttgctcttaaggaggttgtctttaacttccttcctcctatctgtgtgattctcatccaccaactctccccacagcattcaagagagataatatcaattcattaagtggacgtcaacttcatcaatgttcccagtagattaacaatagtgttagccctgaatcctccctttgtagggtcccatttgtcgttcttgggatgccccagagtgttgtatctagggtggatctctaagaaggaggcacctatcccagagacagtttataactgaactcagattagcagtggattcctgaatcaactgacagttgttgatctataattccagtgtttccccccttctatgtgttccccacagagcatcaggtcaacttcatttgtggcgttctgagtgtgtaaagcaaaatgcacataccaaaacatttactattccttgtttctctgaagtgctcaacttgctgtctacacatcgcttcacttccagttttgcttcaacagcctcgggaggtgcatcatatttctcaagttccttcctcatggtttcctcataacccattaggaagacactgctttctcgaacaactgctcgacagaccaatgcagcatcagctggaaagagtaagggaaagaattcagctagccaaaattacttttcacttttaattatttttttttgcttttgcttgagtctctctgatttaagactgcagactgaacatgataaacagtattatagctcactcctgtgactgaaaaagaacagcgtgacttcctcaaggccacagagcaagggactgaagaaagattcacattgactctctacttttctgtatttgaattcacattcacaacttctaaagtttctgtggcttgctgaaatttgttttctagcattaatagctggaggtttgactgcatcttctgtagcattttcatgagtctttgatagttgaaaaaaatgaagttttgtgtcatgcatctttgacatgaataacagagttagaattttacaagagatgggaaaaggaaaaaccaaccagactgctcatgtgtagaatggccacattttgaaattgatggaattaggtcagggcatcaagtacagttcaaggtaaaaagctaaagctacaagagcttttttgttttgttttgtttttcttttctttctttcttttagttttgagatagtgttctctgtgtgtctcttctgtcttggacatgatctgcatatcaggctgttcccccaactcagagatctgtctgcttcagcctaatgagtgctaggattaaaggtgtgtgccaccactgtgcagctgagttgatcaattttgactcacaccagagcatatcctggaaactgtaacaaactttgccattccacacggatgctcagacccttctagggagggtgacaggagaagctgacacctccctatggtttctaaagatccagatgaatgttttggcagaactaaagaaatcagctctcctaatctaggttccacattcccttcaagactctttaaaaagcaaaataaataaacaacacctgtcccgatctccagaggtggtgtgggctgacctcagaaagtttctcatgtttcagctttacctagcttggatgtcagggatggatcacctgagccagttttccctaggacaggacaatacagtccttgggaggtacccaaacagcatctgatgtgtaccaaaagcaggttccattgggatcaagggcatgttgtagaccattgcatgaggggtagttaggcagtcagagggagatgcaaaaacaaaagagagtagctgcccatggaacttggttcatttttaaggtactgagcatgcagaatgactgttcacacagaaatgggttgtttgcaaaaaattaattttaggaaaatgaatgtcttagtggtaatgactgtactattcctatccctgttattggtaggaccccccagaaaatgaccaggctacaccagccagcttcttctcagagtctaatggagggatttgggttttgtatctcagactcaggaaacactgatctggaatggaactatctcaagtcaccttcccaggaactaagacaataaactgaaaagtaacacaaacaacaaactccctctgatgaaaagcatttcctgaactttgttcataacggatgtcttgtcctccctccacctcatcaagcttcctaagtaggataagattagttgaatgtatctgggcttttatgagggcaagaaagaaaggatggaaggaatttttgatcatcttttcctgactttaaccttccacacataaatttaccaactgttcagagaggcaaacttaccaggagctatggctggattgatcataaatgatactcaccctcatagcaatgaacagccaggatgaccaagagaagacacagggacagcctcatggtgctcagtttgttttcagacttagcaaagggtgagcaaatgcagtctaccagagaccctagcccagggatattgatacatggtgaggcttactggtcctgcccttcatacacatggcagctcacaagacctggtttaggccccccttctgcatcactgagggctgatccacttaccttcctccatcctcatgggctgtagcccaggagaacagcctcatgggaccatcattgttctttcaggtgacctttcacatcacaggaagtaatttgtgaagtttcagtttacttgtgagcttttgattattgcacttgagttctctccatctcaacaggtacaagtggcttctggacaacaggatgacattttccagggtgcagaacctccaaatacttgccctggaatagagctttgcatttggaccttgccaacactcatccaaaccctggcataaaaccatatcaaaagatcaggaagatctgaaagaaagaataacctcaatgcactggaagcagaaaacaaaataggctccaaattagttaaggaaggaaacactgaataagacaaagcaaaaaaatacagagcagaaagcatagaaaacaccagtggatttaagacagttcttggaaactatgaactagggaaatgcacatctagatgaatatagaataatgggaaatatgaaatgaaaagtgagaaattaccaattattccacagaaagaaatcaaaggattggcaggggttcttatgatcaacttcatgccaacaaatgtgacagaatacaggagccatttctgaacgtatgtattctatcaaatggaatcatgaagatttttaaaaatctgaatagacagcaatttgtgattggagtgtatatatatatatcaaaagtttccatacgaagaagagtaagaccagaacaaaatggctttactaatgaattctatcaaatatttggagaactaagaatattcttattttattccaaaactgcattgtagggaattgttcctaaagcatcctgtcaggccagcatttcactgatccaaaatcacacaacgacactcacactcacacccacacacactcacacatcaaaccctaaaactctggtatccttttgaacatacttgtaggaatactcatcaaaattccaataacataatcccacagcacatattgtttactttcataaacagtgttacaagggtgactcaacaaatgcacatatatacacattgttttgcatcagcataatgaggaagaaaaaccccttcatcctctttgttggtgatggaaggacatcatattaaactgaacaagaacacttctgtgggctggcaagacagttcagtgaataaagatgcttgccaccaagtctactgacctgagttttcatccctgtggcccacacagtgaaaggagggagctgtcacccattaattttcccctgaacttcacatgcttgcagagataaatgcatgtccacacatacataaaaacagaagtattttaattaattttttcaggtttgtttgagacaggctttctctgtataaaagttctgactgtctaggaactcattttaaggtcgaggctgtctcgaactcacggagatctacctgcccctgcctcctgaatgctgcctaattaattatttctcaaaattaacaattctttattataaaattatggacttaattatgcatgaaaaatgtatcttttttttttttggtttgttgagactgtgtttctcagtgtagctttggagcctatcctggcattcgctctggagaccaggctggactcgaactcacaaagatctgcctgcctctgcctcccaaatgctgggattaaaggcatgcaccacaaaagcccgcaaaaaaatgtatcttaatataaaaagactacttatagtaattcaaggacatcttgtaataaaggatgtctactttctctgtttattcaaactgtgggaatcctacccatagcaatcatacacagaaaagtcacaggtagccatgatagaaagagaacagtgtctgaagatcttatatgtagagaacacaaaaactgtaccaaaaactggttacaatttataaatcccctgagcaaggctcccagttacaaaccagctcataaaagcagcagtgttagtaatgctaacagcaagttatctcaacgacagattgtgtgtgtgtgtgtgtgtgtgtgtgtgtgtgtgtgtgtgtttgtatgctgtatgtaaagtgtaggtgaaggacaactgtgtcagttcttttcttctaaggtctgtgcctcaggtattgagctcacatggttggactcgaccacaaatatatttatgcaccgagtgatatcactggctctgcttatttattttaaatgaaattttattaaacattgtaagggcgaacagtcttggagatatgaaaagaatattgcctgccatctcagccaggtttatttatttcttgggatctggtgtttatttatttatcactgaactatattctagctatcagtctatcttctagagaccctagtgaattgcttttatcataaaaatgtagaaagcactgagaaagagttctctccataagtctcctcctgttaggtgttgtaaggcatttggagtggccaactctgctcatgtgtaagattctgaggctaccaggagtctgggagcagcacagccgtcactggtacaacaccatccttttttctgaagactccactctccttgcacacattctgtgactgattcatctgtgcaatgtcagctgagacataaaacctgcctcacacatgtgcaggaagccggacacctgcagtttgtgaactccatttggaagcctgagggaagtcgcttctggagagaggaaaattcagaccagaagcacatgtgtactgtgggttccttcattgtccccttaaactagctccacaaacaagcgtctttttttcacccagtgaccattattcactctccagagaatggcttccaccaagtatccaggtaaaacccaagtcacagtcacagtcccttcagtgtggggtgggtattgttcagaaatggaaaccacttaagtggcctccagcccagcaggtgccagggcagggacataagtgtgggaagagagtggagcccctctacatcctgctctgtgaaactgtgccctgtttacttctcaagacctttacttgactggaggttgaagattcagccttggacaagcagctgtgagtacccgggaaggagggctcaggtgtcctttctggagaagccaactttgttcttggcaacttgttctgtggattgatgagaaggacagcaccattattcatcgcacagcaaagcacacttcggatcatcagagctcacacagttcctgacactctcgcttacttctgttggtttaattctttagtatatgagccaactattcttttcttgttccttgttccttcaactggttcccttgtccttaactgatctaggctttcagacacaagatttttgtcttgtttgtctcttgatcttatggtcctactttccttgccttacttgactttgtcaagtatcaactctcctcaggaccgtaaacttctcccaatgatcaaccacattactgatatctttatgttggatatattttaaatattcaataatatcactatttttgttttcattgagagaagtgtgctttgaggtaaaattaggcaagagatgcatttcactttcatagaaacttggcatacaataggtaccaaattctgtatttcttttcttctaaaaaaaaaaaaaccacctcccattaaaattgttctttgtcgatttcctaggtgtatatcgtgcattctgactgaccttccccagcactctcctggccccctctcacatctgtcctccttcctttccacaagttcctctcccacattcgtgtcttattgttttgttttgggagccactcacttgaaccagggctgtctatgtgaacagggtttggagcagcaaccgtcctctttgaaaacccttcccatgcctgtgtcctgtactgtgtgcctttcccttttcatccaagagtctcagagttttgggctttatgttgacgtctttgatccattttcaggtgatttttgtgcaggaaagggaatccttatttgcagatgtcatcatcttatatataaaaaatcctgaggactctaccagattaaggttagatatgataaacttataaaactcttagatctgcaaagtagcagaatataaaattaacacattaaagtcagtagcattcctatagtgacaatatattcagaaaaaaattagaaaagtattcccacccaaagcatatgttcaaaaaatgaaagaacttgtaaataaaaaatatcacacagggaaattaagcagacccgaattctatacatttcaatgtatgcccatacagttgcaatagccatgctgaagctatggagcttcaaactggattatacactttctctatcaaatatgttttcatgcaattgcccaccaccaaaaaatgaacaatggtcagtagcgttgaaagtagaagaattagagtcatattcatattgatgattcacatgtcctttacctgtgttaggtcattcctcttcccaaatattgatcctttcatgctcactttttctctggtttttcactttcaagatcaaaattaccttggaatatttaagaaagctgtattttaatgacacatttcagtaattggaacccatttctaactttaggagctactggtaagggaattataattcacccgttaacgtatacaactcagtggtttaaaaataatacctgggaataaacttaaccaatgaaatgaaagacctctttaatggatactttatgacactaaaaaataaaattgaagagaaagctagaaagtccaccaatgttcatcgattgtaagagttgtaaaaatggccagcctacccaaaggaatctatccatttaatgcaattccagtcagaattctgatgaaaatttacacacaaatagaaaaaaagacaaccatcttttaattgaagtataatcataaaaatcccccaatagattatgtaaccattggcaaacaaaaacaaacaacaaacaaacccatcaacaatgctggaagtactacaatacctgacttcaaactacacaacagagctatagtagtaaatgtggcatcctagcctaaagcaaacggtagatgagtgtttctcaacattgctaatgctgaagccctttaatacagtttctcgtgttgagaggactcctaccatagaattattttgttgcctcttcataactgtaattttgcagcggttatgaattgtaatgtaaatatctgatatgcaggatatctgctatgtgacccctgtgaaagggtaggtcacaacccacagattgacatttgcttctgtagatcaatggaacaaaagactcagagaaaagcccatgtaacttcagccacctaagtttttaaggttttctcttttttctaatttaattttttgagaattagatgaatgctgtgtttacatcattcccttcgctccctctcgcaactcaaacttttcctgtgccctgacccttcctctcaaattcatgacctcttccttacttatgattttcacacttatatagaaatatgtatttacaaagatgccagaattacactttgggaaaaatatagaatattcaacaaacagtgctgcaaaagtggatgtctacatacagaagactgagactgatttctagtgtgatcaatgttctcagtgtatattatatgattacatgaacacttgagaaaaattaaaaatgatttattttttattttttgttttttaagacagggtttctctatgtagctttggagcctatcctggctcttcatctgtggaccaggcttgtcttgaactcacagagatctgtctgccactgccttccaagtgctgggattaaaggtgtgtgtgagaaacaccagccttaaaagtgatttctgtggatgttagatattcaaacattctgtcttaaacttaaagacctggaaaggttgcacatggtgagtgaattctctttcacttgggatgggtatggaaatttattcttttcagctgtttgtaccaagtcagagtggagtagatcatgtagctgtctgaacttgatagaagaagagaaattgagaagcaaaagaagaggaggaagaaatagagtgggggaagaatatgaaagtaggcgaaatccttaatgaccataacaaggatgacaatagatcgtaaactgcaatgatgagttttataagttgcaacataatttcaggcctctctttcctgaagccatgtgtcattgctgcaacaatgaaatgctatcctgcaaaaatcagtgccttttggcagatggaggaaaggaaactgtcatcagatgagattccctgttttaggaaaggaaatcctcatacagtttctccatacatttcctcaaatagctctacagaatgtagagtcccaaatgtggtgaccgcagcagtagaaatatgctggctttgtggatcagaagttactaacaaaatggagatgttgctgtagagaactgattaagtctagcaaccttctcatgggtaaaaggactaaacatttgaccccacttatcaagtaatgtgaaattgtgtgcaattcaggatttggtggaggggaccaaggagaatgagtaacttggtggctctagctgactgaacacatgattacaaaagcagaacatagtgtgtgattggataaaagtttgagtccctaatctggggaagatggaggttaagttaccagagccttgaagggtggggctccaaaatcttttttcttcaatgcatatttgaccactagactctaaattcccatcctggtaagaaaacttggtagtgtcataatccagggattcattcaaatatttagttttgtagctaggactgatatctgcttctaggtttctatttaatgtaacttcacttgcaaatgaagatggtgatgaaccatgtcatatgttcagtggaacctttgttaaagttagattgtgtaatcacagtcaatcattcatttatttagtaagcatctattttatgattgtaatgtaaagataagaacacattctgaggatacagggtagaggtcttcagagagagccatggtatcacatgaaggaaatatccctggaaatatggaaacatgagaaggtgctgacatggcctataggtgatttggctaagggagggagtaagaattttctgctcagagtgaatacagcacggcgggatggaggagattcttcatgtaaaaacctcatgtataaacacttggtggtggtggcacaggcctttaattccagcactctgaaggcagaggcaggtggatcgctgctagttcgagaccagcctcatctacaagagctagttccaggacagcctctaaagccacagattttttgaaacagtccttcagtatttctttatatactttagtttaatacaagtagaagacatggagagttatcttaggaaatgtgaaatttcttgtatgtgtctgtatgtgcacatctaaaaaaaaaaaagaatgtactactgaaaacaacaacaacaacaaaataaatcatgggagtgcggccaaggccattatcggagccatgatcaacatcccagaggcgaaggcaaggaggaagaaagagttgaatgtgcactcttgatccagagacttggctttgtaccctggtcctgccaattaccatttgtgtcctcaggatgttcatccaaaactcttctcagtccgtttcttgtagcttgggtgcaatggtacacccacctcagaggatggttgtgtgtttccagttttactcagggacgtttatgttcatgtttttccttgggaatggctttcatttgtgtctcattttattctgccaagtgcctgggacagtgggataaggtttattcttttccacatgaaatgctacaaggttataaatatgaacagagaactacaaaagtgcctgccattatcaggtgatgtataaaatttccatgaagctttgataaacatttgtttatagcttttaatccacatatgttcattgtacctagttctgggtgtcatgagaaaaaaacctttcggtctttcatatgctttgactgtcttccctgtccatcctttcctgattatctccttctcttcattgctaatgctggcctgtggttttatttatctatataaattctaggcctacaaagagaagaaatcatggcacttttgtctttttgagtatggcttttttttctgctaacaacatgcacatgttttcaagcaaatggcatgccttgtactttctgtctgaacaaaatatgacctgtgtgtataccatattttcattatccaatcatctgctgatcaggatcatttcataatgacatcattggtgcagatggtctcacgaatattcactggtatattgacttactgtgttttattcttatagtcatcagtggtgtagctaagctatatgggacatctttttgtaaaattctccacagccactttcatcgtatccatagtgtcatcatcagtgcatcagcgtttcttttaacctcaccttcactggcatctgttgtcatttgttttcctgatgatgcctttctgacgagactgagagggaatctcaaagtagttttgatttgcgtttcccttgtgatttaggatgctgaacctggtttcattattttttgaatatttgtgtatcatttttgcagaactgtctttagttcattatcccatttattgaatggatgacttgttttgttggtgtctttttctgcaactgtatatattctagatgtaaatcagtataatttataatcaacatcatatttcccattctttaaattgtatctttactccagtaattgtttccttcaaaagtatttcagttttatttcaccatgtctgcccttgagattagtttttgtctcaatggagtttttttttttttttttttttttttttttttttttaaagtcactacctattttgtgtcataaaacagtttgtctgttttaccacgggcatttcaaactctcaggtgtcatgttaagacatttaatccactttgaattgtttttgtgttgggtaagggatgcaatgtgggttctttgtttttgagacagggtctcattgtgtatccctggttgtcctgaaaaacactgactataccaggctggcctcaaacatacagagatctcctgcctatgctgcctgagtgctgagattgaacctgactagttttatttttctatatgtggagagccattttccaaaaactgttaattgaagaagttatttttatttcagagtgtatttttgagacattctatgagcctggcaatgactttctgtttgataatcatcaataccctaaacagagagtctccataaaactcttattttgtatgtacatgtggaagcttctaaactagcaagtttccatatggctttttcaagcatccttagcattagttaccctgctctatcccaccttctctctgtactcccaaacccctccctacttaaccctttcctccactgcatctccttcttctcttcatgcttcctgtgctctgctatcctcctccccttcagcaccctcacaatggccactttctagttgcctgatttctaaaggcactcgaagatttaaagttaagatctgcaaaagaaagagcacagagattgtctttctgggtgagtgtgtcctcactgagtatgaattttcccccagttccaattttttacttgcaaatttcaaaaatttgtttttctttgtattaaataaaatttccttgcacatatgtcccacactgtcatgatccagtcattagtttctgtacgtctgcagtatttccatttcttagctattgtgaatagagcagcagtgagtgggcactgtagtccagagtccttccagtctctatgctcaggagtggtatatttgggtcacatggtagatttatttatagttgtgtgaggaataattcacactgactttcataatggtttcagcagttgatactcccctaacaatgaatgaaggtttccctttgcccacatccctgtcagaatttcttttcatttgatctcttgaccatagtcttctggccatgtgtgatggatctcaaagtagttttcatttgcacagtagatgccgagctctgtctctgcccaagtcaattttcaattgcacataatgagtgcattatttaatgtctggattatttctgacatctttcttcctgtctttcagatggaccagaagatgccaagaacaaagcttgtttgggaggggacagagatgagccatgtgtttacctaggtgtgtactttcatctcctagttcacagccagagtccttcagtccaaagtcaggtaaggactctgacaatgaaatgtaacactgtgtccttgtccaggacttaatgatgatttacctgtgcctcagaccttaatgaactcagcttgtcatctactggagtcccctatagaagcttctcattcattttcaaagcacgccacatgaggtgcaggtgtctagagtaaagagactggactctctaattttcatgtctcctgttggaacttttttctctgaagaatcaaatgacaataatgtctagaaagggcatattagaaatgcacggggtcaaatacagcaaaataagagcattgtggacccccagctggcactagatgagctccaggcttcaaaataagcctgagagtagagaattccagcattccccaatgttcccacatcctgccgcaactgggggcattcagggtggtatggccaaagaatgtcccacatcctggtcaaagtatacaggacaccttctagaacagagcctggtgtaattggacatctcagggtagtacactggagaaactcaagttctctgagagaatgcaggtgatgacctgaaagaatgagacttatgtgtccattggctcagagaagccttaatagtcacattagcagtttttgacaactgaaagcatttgtaaatcttaacgaaatatgaaaaaatgaaaagtatcaaatcaagtgagttgtgtatttacagaaaaagtaaagcaaaaagagaaaatttccctatttgaatgtcctaatataaattttcttttacaattttaaacttttttattaaaaatctagtaagtaaaataatctttaagtgtttgcaactaaaggttacagggttacttctgcaaacacattcccttcttgtctggattctccctctaccccaaagatagatcaacttcagacacatgtaagagcccctcccctcaggctcttttgaagtccagacatggggtggggtatactttcacagcacagagacttcagcagaggccactgcactgggacacatcttttccaagttagatgtctgttagtcaaaccactgatgtattttcttccctaggtgctgttcttgctttggctttgttgcttcatgtttggactccctacactccccacttccctgcagcgtcaatcactcctcagacccttccacagggaagaattcaggccttggctttcctggagccaccatccccagcctgtcccttctgcacagcacagcaggagactccaggtttctcaagtccctctctaagagagagacccgaactcatcaccacatccttctccacacctgccacctatgcagtgctcccgcagggagtggctttccccgtgatgtgtctgcatgtggtactgggggctgacaagagtggaagggtcggctgtgatttctctagagagacttatttctgctgtgatttctctacagagattgtgatttctgctgggatttctctacagagattgtgatttctgctgggatttctctaggagagactgtaattccagaccacaagggagtctctgaggacagaacagatggtttgaatttggagacactcaggaaatgagggagatgaccttatgctcagataaacaggagcaagctccaggaggtcagaaacctctcactccagaagtgttgtcttctttagctggtcattctcagaacagccagaggacttgggagaggaccctgcagggtggaaactgcttccagactttgagaaatcagcagtcctttcccctcactgtctgaagaaagaaggtgcaagtgtgaggaggactcagaccacaacacttttgtgagatgatgtgttctgctcctttaaaataacaaatagcacagagtcggggaagataaatgagctacagtgtgtaacatccttagggtggtgattgacgaggagtgggtgctgtatacatgtcagctggtccccaatattattcgagaatcgagaagtgtgcttgtgataaatccccagtgacagccaggtacccagagcattagagacacccagtgtcctggctgcgggtttacctccttagcttgatgcccagatggtactgcatgcctagaagggaagcctatggccttgactgtgctgtgctgtgtggaccaggtgctgacccatgtgcaggccccacagatttctgcttgagcctgttgcttcttgttattttccttctccttgcttcatctgagccattttgagttgaaatattaaaatcatctccatgtcttcaagtccaaccgtgatgtgccgtcctggccctttcctctgagttttttcccattctaaggacacaggagtctccctcagtagtttttcttgacatttccatgaccttcatcacttgccactccttcttcttcatgctccttggagctccatgaagctcctgatcacttctcatacattagtagcatatattaaatgtttaataaatggtagtgcaattgactttcagtaagcagaaattcttgttttataatgaatgctctaattatattatttatttttatatctaggtctgattaagaagcaaattccattaaagttttaaagttcagtaaaggcagcaataagactcaactaaaatcccagcattcgggaggcagaggcaggcagatctctgtgagttccagggggagtgtcaggataggctccaagctacacagagaaaccctgtcttgaacccccgcccccaaaaagactcaactaaatccaggtaacatctaagaccctaattttactttactgagcgagtctgtttttattgtttcctggtatagtttcaggcttgaccactgtatattgagtaaccaatattggggctcatcccttggacatgtaataaattcattttccttcccagcagtcattggttgactgtagttccatgtctagatgggggaagctctcttccctgttaattcctccattgattagccatttatcttgccttgtctatgtaactactcccaggagagtctttcacaacacattccctttggttccaactcttacaatctttccgatctgtctatcagaatgtttctgagccctagatgaaggagttatgtctaggtgtccttttgtgctgggctccccatgaccagttgatctctgcagtgtgtccaggtgtggtttctgtgatggtctccatctgttgtaaagagaagagtctttgatgaagggtggtagttacacttctatcttgtggtgatgtatcgtttatgattaaataagctttcctgaagggccagaatgcaaagccagacacactagacatccatacaaactgggcaatggtggcacacacccttaatcccaggactcaggagacagaggcagatggatctctctgagttcaaggccactcaggactacaggagaatgaatcagtaacagagctcactttaatcccagctctagagtgatatataagaaagaagcaaagggtctcatgttggaatgactttgcagctactctgtggagagcacagcagtctaggattctgaggcttggtggagagcagtgcagtctggagatgcaatctgaggttcagtggatctcccctttggtctgagaattggtagagataagacctctccagtggctggatgttctgcttctgtgatgtaaacttgaaccccaatacctgtctctgtgtttttattgtttgtgctacaatatccaaagatttgaaggtaggaagcacaaatgacagagaaatgtaagcatttctctttctggggctgacttaccttactcaatataatcttgaaggttcagctattcccggcaaaatgcatgctttcacttttatttagttcgataacactccattatgtatatggaccacattttcattatccatgcatctgttgaaggaccttttcctggttgctttgaatagggcagttatgaatattgctgaacaaatgtatgtggagtaatatgtaaatcgcttgggcatagatgcaagagtggtacagccgggtcatatatattgatttccagagtggctacaccaatttgcactcccaccaaggaattaggtttcctctttaccctacaatattgctagcatttattgtcagctgttttgctgatcttagctgtcctgactgaaaagagatgaatgacgctttgttaaccatacgtctgacagaggattaataaccagaatacacaaagaaataaaaaacaaacagaatcatggaagaatatatgaaaaagccatatggctactttgcccagaatgcaacagggcatccttggtagaaactgctgagtccagcctgatgcaaacaaagatgggcagagactcacccataaccacatctgactgattctccatggtagacttatatttatcctggatggggtgttctttactattgtatttctaagtggtcatagtgtcaaactgtcttctaattatgcatatttatgccacagatagtactgtactcagccttcatcagggaactctttggcactgtaggcagtgttaatacagaatatgtcactggctaaagtgctgagagatgatgatggagcattcagcccttaatatgactcccatttcattccctccaacactcaggggacatcctggcagagaggtgaaaacaatgtattgctagtgtctgtatatgttctaaaatcaatacctgatcagatgaagaagtggcaggggtgtttctcagtctaccagttttctattcattttgagaattttcttttctgaacttttaaaatttcaagtcatcctttttgtcagttttgatctaagttcctaagctgtccttgtttatgcctgggtcactatttcctctcattttcctgttgttagtttctatttcaggaggtaggttatagtgtttgttacattttgaaatgccctttgtgggcatgtagattattatttaatgtagttttctgaaatggcattattaaatttttaaataaaattgaaattgtatcaaaatatattaatttttcttctttaatgtattttgacacaataattgtgagactgtaaatgaatgtttcatttctgactcttctaatatattccattggtgacatcccttttcattccagtaccatgctggctttagtacccaagcccaggagtttaattggaaataagatactgtgacagctttagccttgttcttgttgctatggattgtttaggatgatcagaggcttttgtgtttccatttaaaattggaatttttttggttttgtttttttcctatttccctaaagattagtttttgaaatcttgataggaatttcgttgaatctatagccatttttcaggaatatggatattttaacaatatgtatttggctgattcatgaggataggtgtttttcctaatgtctaatgtcttattcatttactttcctcaatgtcttataggtttcactgtgggagtcttacacctctttgcttaggtgattgtcacattcttgaggtctgcactcacctggaggatagctttggtgaggccttgttgggttatgtctgtgggaggaagcaccctttcctaggcagagagccctgaattgtatgagtgccaagtcagcctgagcacaagcaggtaggcagtgagaatgtgtgcattccttaccttctgctcttgggcatggtgtgatggaactaagtgctccaagcttctgtagctgtgagtccaccacaatgacgggttgtgactgacttgtgtgtcaaaataaacttttactccctcaggttgtttttgtcaggatattttatcacaccagtggcaatgaatttaggacaggaacatttgtaggtctttattttgaatggcattgtattcttaaattccctctcaatgtattccttattggtctatggaaacccagctggcttttgtatgttctgtgtcacattctgatgcttttctaatagagtgtctctggtgtaagaggtttcttgtagagtctgttttatttattgatcagattatcttcaaacagggataacttgatttattcctgtgttatttggagtttatttcttttcatgttgtttttcttggctgaaaatcaggcaactctagttagggaagaatgtgtttatctggtttaaggttcagggtgatggagtccatcacagcagagacaagatagtgacaggcagggatgacacagcggcagggacaggaagctggctgagcacattttcacccacatgcatgatgcagagaagggacatatgatatgggaccaggcttctaacctcaaatcgtcttccagcaatgctccatcttctcaagtagcctttctcaacctgtgggtcatgaccccattcatagggactgcatatcagatatcttgcataccagatagttacattagaatgagaacattagcaaaatcacattatgaagtagcaaccaaaataattttaaggttggggatcaccacaacataggagctgttaaatgactgtagcattaggaaggtggagaacctgtgtcctattgtttccatagcttttccaaaggtctccacaacctggggactaagtgttcaaactcacaagcctatgggagacatttctgaccctcagccaccacaggcacccagtgcaaagcacttagggaacagacacacttccctcctccctcattatcacgggagacagtttactttctatgtcagagtcctgcttgttctttcattttattaagcttgacatgagaaacatttaatatgcttgtcgtttcctttgattcctaccttcagcaggacatctcaccactaatggaaatatctgaaaaacaaaacaaatccaaaacaaaccaacgagcaaaccctctgaagtctatgaaagcccttttcctcatatgagatgatcatatgctctcttgccctgaacctgagctctgattgagagccatatgtggaactatctttgtttcctagttcttgtagacacaaagtcctggtggcagcagggctgggagcatgtcctagtctcagaccccagcagggtagtgcctaggaagatgagtagaggcagtggtgagaaagaggccagagctgtttttcagagaggggactcatgcatggtgacttagagacactttgctgtcttcatctccctttaagttgtgtgggaggcagctgtgggtgtttgtcctagagtggagggtagcagacctcttaagcccccagttttaaaagagcacaaaagcattattgatatttgcaattgatttaatgaagtagaaagaaatgccttgagattccaacaattgtcttgcactttatagacagaaagatacaatcaagaaggaaaagttatgatttgtggtatcagctgctggcttctgacccaaaggtctcgtggacggttaatatgatgaacactcttcactgtcgtatattgcttgctgaaaaataaatgaggaagggacttcaattttgaactttgattggagagcccaatattgaagagaaaacgtttttgtattttaaatttttttcaatattttcaattactcttaaattctagaacagtcccagagaaaaatatgattagggacatgagttctttcatttaagagacaaggagtcatgaaaacaacagcagtaataaaaccaaaaaaaatttgcatttttcttcaaagactcctcttgattgcctttcccctctaaatccaaacctcctgagctgctttcataggaactcattttttgtccatatgaagctatcggtgactctggacaaaggtatttcatgacccgtaatttgaactgctctgctattagtctctcaatatttgcacaattgaatccttgcttagagaaagagtgtgagtttcaaaagttcctcaatgttctacaaaatgagatctattagaagcaaatagagagcccccacctgtacttttaggcctgttgtattactgtggttttacttaaaactgggcatattcctaagatttggcacacgtagaatgcttaaaagtgatcaggaacactttagataaattcttggaactacatttttacacttgagaatattatatgtatggtacattatattatatttattaaagggtttacttatttattatgtatacagagttctgcctgcatgcatctatgtgggacaaaagagggcataagatctcattacagatggttttcagcagccatgtgggtgatgggaattgaactcaggacctctggaagagcaatcagtgctctaaacctctgagccaaacccaaagccctactttttttttttaaaaaaagacaacattagtcacgatgttcttaaacctctatctccacattttctttattcgtgccccaaaaagggtccctgatcactaacacaaagcagggtttcctgagaatcagtgtatttttctcttactaaaggatttgaggggtttctctttctcatgacttgcctatgtgtgtgttcatgtgagtgtgcctgcatgtgtgtgcatgcacacctgtgttcttttgacttggaagtagtggatgagagagtgatctctgggtgatctccttcatttttgtgtttttcctttattgttttaaaatcctcagaataagatggaatatcaactgtctttcaatggctttcttgaaccaattgttaccactaaatcaaattatataattcaaaaatagtacatagacaggttttttctttgacctttttagtcataaatttctaacctggtttttctgcattagtgtatgtatgtgtgtgtgcgtgtatagttacatagtacaaatatatataattatataatgcaaaaaagggaaaattgataattaccaccatcacattaacattatccagagtctccgcagactggtcattaaaacattgcttgaacttttccacagcagttttgtcataaggaagagctgtgtatgatttaatcacttcgtgatattcttccagagtcacattcccatcaattgtctgtgcaatagcattgtccattgcattgcagccagaacctggaacgacatgacattcatcactggaggttagaactcgttagaggttacctcatcctcttgagtacaagtagagacacagatcagctaaggagatggagcactaccaaatctgggacagaaaatccaggctgtgagattgcacttagaaactgcaaactctgcccctgacatcttagcacaaagaagccaaaccctcactgacacaaccctcactgcaaggacactggatagatggcaggccacagtggtgggcatggcaagcattttggatctttgattggttaaagcctaccacattactattttgagaacatcatggagtatattcaaatatcctgtacctattatgactagaatattgtccactttgctctgtgaactctagcatctgcatcacaaagcatcttaaacagagaatctagtacttgaagtgacttcatgcagaaaatggatgtagactgcaagattccttcaggtcttaaaaacttgcccctaacaagctaacaagggagtcaaccagcacactccccttgtcagcaatgacacacaagaaacaagaggccaactgggcggtggttgctcatgcctttagtcccagcacaagggatgccgaggtaggcagatctctgtgaatttgaggccagtctgatctacaaagctttacagagaaaccttgccttgaaaaacaaaaacaaaaacaaaaacaaagaaataaaaaaaggagatgctgtgttctgatgggacaaatcaaacaggcatgtcttttctttttctagccaagatgtatctcagtgctgttttgtgaaaccctatgaagtatttcataatagttcataaatattatcctctgtcaccattaattctgtcatcttcataaagtatcataaaacataaacttttggaccttaagtgatgtcatttggtcaactagtggaagagaaagaggtcaggaagtaggttcaaattaactagctttaccctaagcataaggctaaccctgatttccctatcattttagctgagaactccaccttcttgttattttgctccaacctctcagataagtgaagtagacaacacaagcaatacaaatcatacaaagtctattgcacgggtgacatgtttgtactgaccgcattcttagggacaagctttacttctgtcattaattcacatggacttgaggaatgggaactgtcctctctaccagcaggactaggaagtaagtggtccaatgccacatgatgcagtttgagaagtaactccttccataggtaaagagattcctaactgcaattttaaggaaagccatccagggtcatttatatcttccccatttcctgtaaaataatttcatatctgaatctaagacctgccatggatatcaggagacctgtgactaccatgggacctcctgcatagtaatgacacttcccatgcagccccagcattggggacaaaccgtcatcagcaatacttctatccctcatcagtgatacttctttgattatctggactagtactgagttttagggatattgtattagatactttgtaccactgttgacctgttctgactcaagtgctatgaattcttcctgtagaacagaaacaatgtggtccaaaagcagcccacacccttccacagaactcaccactggcatagcagcaaatggggatggaggccagcatgaagaccatgaccaacttcatggtgaggcagctcttttgggttggtctttggtacaagatggagctcagggaactttctggagttgagacctcagggctcctctatttatttcttgggcagctaccctagtgtcacccaggaaacaaaaaggcaagtcatgagagcaatgtgcattgtaccagacaacatgagagaacatgaaacagagccaaagaggcctatgaaatatttgcacaaaacaaggaaacaaatgattaagtatgacatgtgacaattgttgacctatccctaagtgtttccaaaaataatgtagattgtagcactatagtttgatcttcaaaaagatattctcttcctccttcataccctttctccttcatttacccctcttcctcttttttgtcttcttcattgtcttcttctcactccttttattctttctcttttttgctcattcctatttctttgttatgtcctttccttgttctttaacttttattttccaattttaagcaatccactgtgtttgcacctgtttctgaggtctccagtggctagggtccatgcatgaccacatgcccattgcaagcaggttttcctgttgactgtcatcttccttgagttccagaggaagcctattcccttctgatccttactgaagaggcttaggaagtgtcatttcattagattaacgtccattgttcattccaaatagctaaacacatatttccttctgtgttaaaggtttagggtgtcacttctcctgaatcaaaggtcactgtcagctcttagggctccttgttgctttatgggaggaagggaggaatgatgggtttatgaattatgcggttgtgacttcagatcctggggacagcatctgctcatgactaaccctgagcagctctcctgtctctctgcatttccttttacccatggtaatgtgagtattggcaaaactctggtgaagttatgtcaggacagcagatactgcatttaaataacttttccacatggcctagataaccactaattagtggaaaattttcagtgctgaaactgtggacattagtataatggtccctcaagttaaaaaacaaacaaacaataaatgataaaaccaaaaacaaaaggattactctgaaatccagctagatcacttgggtatataatagaatgccaaagaaggcatggacatccatattattatagcattagtcactagccaagctataggatcagcttagatgcccgtcagaactagacaaagaaaatgtggcatatatacccaatggagtttcattcatctgtaacgagaattaaattttgtcacttacatggaaataaatgggacaggatattatcgagttaaacaaaatagttgaactcagacagacaaatatcatgttttctataatatttgtatgccttatgtatctattcctgtatctgtatttgcatgacatgaaacagaggaggaactattcctagtgaggaagggaaaggaggtattgatgggaccaattgaacaaaggaaatgatgcatgagtgtgacaggtaataccacctaaaaatttcaggttacataaaaagaactaggctattgcaagagaaatagtcaggggaaaagtcaagtgggggttttcatccacagatcaaaatatcacctgtctgatgtggaagacatatttaaggggcgttgagtttgaagaatgctttggtccaggtcttgtgtagggcactttttaattggagaatctttacaatcgtagcaataaatgtaagatttcaaatgagtcatgtgtgggaaggacaatcctttctcaatggtgttatggattgaagacattatcctgtacagagcatggggaagcattggagaaggtgctgttgtcttgaataattggatggtgatactgtgaaaccctgtctcaaaaaaccaaaagaaaaagagagagagagagagagagagagagagagagagagagagagagagagagagacaggggagatcttagacaggatgcatcatatagataaagggaattgtcaaagaaaacacttaataaaagtggtcaagggaaagtcctggaggcttcaaccctataaaatgaactgcgggcaactaaaggaatgtggagagcaggagaaatagctttccctagggaagccagggcttttggtaattcaatggtaatggtcagccctgacatatacaaatgagtaacactctacagactgagcaggttacaattaggaatatatacataaacacacacaaacacacacacacacacgcacacacacacattcaaaatgacgtaattttatcataatctgaaaaacgtttacaaaaatccagaattttgttatatgttgtgttctaaatttgctaaatgaaagtgtaaagtgaggttcgtacttatatttagatcataatagactgaatttcaatgaaaataaaaatagtgacatgaatgaacatttaaaatatatccaacacaatgatttcagcattgagattgatctttgggagaagtttggagcctgaggacagtagctactggtaagggaaggaacgtggacacaggagatcaagagactaaaacaactaactctgcttcctgaaagtcaattgcactgtcatgtgttaaacatttaatatatgcatcttctatatcagaagtgatcaaggagcttcatggagcttccaggaacatgcagaagaagggagtggcaagggatgaaggtcatggcaatatctagaaaaattactgagggagaaccctgtgtcctgagaatgtgaagaaactcagaggaaagggccaggaggcacatcaagtgtggacttgaagacatagagatgattttaatatttcaactcaaaatgactcagatgaagcaaggagaaggaaaataacaagaagcaacaggctcaaacagtaaactgtggggcttgcacatgggtcagcaccaggtccacacagcacagcagagtcaagaccataggcttcccttctaggcatgcagtaccatctgggcatcaagctaaggaggtaaacccgcagccaggacactgggtgtctctaatgctctgggttcctggcagtcattggggatttatcacaagcacacatctcgattctctaaaaataatggggagcagctgacatgtacatagcacctattccttgtcaagcactccataggatgttatacactgagctcatttatgtctcacgactctgtgcttatttttgttattttaaaggaggagagagcatcgtctcacaatggtgttgtgttctgaatcctcctcacacttgcaacttctttcttcagacagtgaggggaaagggctgcagacttctcaaagttggcagcaggctctgcctagcagggtcctctcccaagtcctgtggctgctctgggaatgaccagctagagaagacaacacctctggagtgagaagtttctgaccttctggagcttgctcctattttctctgagcataaggtcatctcagtcatttcctgagtgtctccaaattcaaactgttctgtccacagagtctcccctgtggtctggaggtatggctcacacatgaaatccgggcatatgggacgctgaagcaggagggttacatgagtctgacacaagcctcagccttgtagtataggttggataactgcctgggctactgaatgcgacccagtctccaaatagaaaaaaaaacgatggaaacaaagccacccactgactctgagtcagaggaaatacttcctctctcttctacctcccagatctctctatcccttcctatcttcctgtcctttcagggttgtgtctactttgtgtctcttcagcctttagggatgtctcttcagcctttagggaagtataaagtaatacaggtatacaatacaaaacactaaacactgtgtgaggaaggttctttctcaggtgctgtagcttcaccattgaggctgaggccctcactaaggataggaaagggtttcctagagaaatcccagtctctcctagagaaatcacagcagaaatcccagtctctcctagagaaatcacagcagaaatcccagtctctcctagagaaatcacagcagaaatcccagtctctcctagagaaatcacagcagaaatcacagtctctcctagaaaaatcatagcagaaatcacagtctctcctagaaaaatgacagcagaaatcccagtctctcctagagaaatcacagcagaaatcatagtctctcctggagaaatcacagcagaaatcacagtctctctggagaaatcccagcagaaatcacaatctctgtagagaaatcacagcagaaataacagtctctctagagaaatcacagccgacccttccactcttgtcagcccccagtaccacatgcagacacatcacggggaaagccactccctgcgggagcaccgcataggtggcaggtgtggagaaggatgtggtgatgagttcgggtctctctcttagagagggacttgagaaacctggagtctcctgtgctgtgcaggatggtggctggggatggtggctccaggaaagccaaggcctgaattcttccctttggaagggtatgaggagtgattgacgctgcagggaagtggggagtgtaaggagtccaaacatgaagcaacaaagccaaagcaagaacagcacctagggaagaaaatacatcaatggcttgaataacagacatctaacttggaaaagatgtgtccaagtgcaggggcctctgctgaaatctctgtgctgtgaaagtataccccaccccatgtctggacttcagaagagcctaagggctcttacatgtgtctgaagttgatctagccttggggtggaggcagaatcctgagaagattggaatgtgtttgcagaggtaaccctgtaatcttcaattgcaaacacttataggttatttaatttacttgcaagattgttttttgtattttgagacaggatagctttggagcctatcctggtactctctttgtagacaaggttggcctcaaactcacagagatccacctgcctctgcctccagagtgctggggttaaaggcatatttcagtaatgcctggctacttacaatatttttaaaaataaaccatgaaattggaatagataattcataaaagaacatgtaaataggaaaattttctctttttgtaacttttttttgtaaatacacaagtcatttgatttgacatattttgtttttttttttcatgttccatgaagtatgacaagtactttcagttgccaaaaacttttaatgtgactgtttgtcaagttgtctctgaatcagtggacacataagtctcattttctcaggtgacaacctttattctcccatagaacatgagtttctccagtatactaccctgagatttccaattgaaccaggctttgttctacaggttccccataaatacttggaccaggatgtggaacattctttgtgcataccaccctgaatgcctgcatttgtggcaggatgtgggaacattggggaatgctagaattctctagtctcaggcttactttgaagcctggagatcatctagtgcccgctgggggtcaacaaagccgccatttggccatatttggtcccctgtatctctaatatgccctttcggcaccaagttactgtcatttgattgctcagagaaaaaagtaccaacaagagacagaaaattagaaagcccagtctcttcactctagatacctgcaccacctgtggggtgcttttaaaatgaatgagaagcttctaaaagggaccccagtagatgacaagctgagttcattaaggtctggggcatacataaatcatcattaagtcctgggcaaggacacagtgttacatttcattgtcagagtccttacatgactttggactaaaggactgtggctgtgaattaggagatgaaagcagacacctaggtaaacacatggctcatctctgtcccctcccaaacaagctacgtttcttggcaccttctgaaagacatgaagaaatatgtcagaaataatcctgacattaaataatgcactcattatgtgcaattgagaactgacttgggcagagaaagagcttgccatctactgttcaaatggaaactactttgagatccatcacacatggccagaagactatggtcaagagatcaaatgaaaagaaattctgacagggatgtggggaaagggaaaccttcattcattgttaggggagtatcacctgctggaaccattatgaaagtcagtgtgaattattcctcacacaactataaataaatctaccatgtgacccagctatatcactcctgagcatagagactggaaggactctggactagagtgtccactcactgctgctctattcacaatagctaagaaatagaaatactgcagacgtacagaaactaatgactggatcatgacagtgtggggcatatgtgcaagggaattttatttgttgcaaagaaaaataaatttttgaaatttgcaagtaaaaaaatggaactgggggaaaattcatactcagtgaggacacactcacccagaaagacaatctctgtgctctttcttttgcagatcttaactttaaatcttcgagtgcctttagaaatcaggcaactagaaagtggccattgtgagggtgctgaagggaaggaggatagcagagcacaggaagcatgaagagaaggagaagatgcggtggaggaaagggttaagtagggaggggtttgggagtacagagagaaggtggggtagagcagggtaactaatgctaaggatgcttgaaaaagccatatggaaacttgcgattttagaagcttctacatgtacatacaaaataagagattttatggagcctctctgtttagggaactgatgattatcaaacagaaagttcattgccaggctcaggatctcaccctatgtattgtcagtcaaagaaatctcatagatccccacaataaaatagattattgccattgctcttagttaaccacaagaattagttagtaagacactgtagctaaagacacaacacacttgaatcacaaagcatgatcagtgaagctaggaattgtctgagaaatcccccctagagtctagtgttattcataattccagatggtgctatatggacagcccagtaagaaaaatatttaaccaatttacccagcgatgaacactgagaggtacaacaatgaccaacctcgccagatcacccatcggtgccttggttatgcgaatgttatgggagtagccaatggctttctgattgaacgcacggcgtcctatatgttttagaactcgtgcctggtactctaaatctgaccaagaacctgtggctgaagatgtcacagacactagtcaagaacctattttattaggttgttgttttccttttgcttttggtttttaatagaaagcttactgccttctaattgcttgtctctatatccaaagattagtgattctctcaacctttttagagaagctttgttttgtagcaaatggcagttaacacagacactcattgctggttagagttcaggataagtaacaacggagtaatcctccctaaatatcatggcctctcttaacatggcttatggaacattgcagaagatggggtggagcgactgcaaaagctagaggtttgggaggaccattgtaaaatagtaacttctgaacacataagaggctttgcatgcatgaactcactgtgactgtggttgcctacacatgacctatacaggatcaagccagtcaatattctaatatgcattagggaacggtttatgaggctgaggaacgttgacagttgtagggtactgatggagggacagtccgttttctgggtccgtgaccccagaattttgtccatgtgccaacaggaagccctacccccctgaacataagtacagcacacattggactcagtagcctatgtaaagaagaggcaaagtttggagatgtgtggggaggtttgggaagaattgaaaagataatggagaatgacatgatgaaaatacactgtatacataattgtaattatctaacaatgaatttttctcttttttatttaaattagaaacaagtttcttttacatgtcaatctcagttccctctccctctcctccttccctgcctcccaccaaagccctatcccaacccctttctgctccccagggagggtgaggccttccatgggggttttcaaaatctgtcatatcatttggagcagggcctagaccctcccccaagtgtgtctaggatgagagagtatccctctatgtggagagggctcccaaagttcatttgtgtactagcagtaaatactgatccactaccagtggccccatagattgtccagacctccaaacggacctcctcattcagggggtctggaacagtcctatgctggtttcccaactagcagtctggagtccatcagccaccccttgttcaggtcagctgtttttgtgggtttctccagcctggtcttgacccctttgctcatcactcctccctctgtgcaactggattccagagttcagctcagtgtttagctgaggggatctgcttctgcttccatcagctactggattaaggaactaggctggcatataaggcagtcatcaatctcattatcagagaagggcatttaaggcagcctttcgactattgcttagattgttagttggagtcaactttgtagatctctgggcatttccctgtaggggacagtgtaagccactcatgctagaatctggctacaggtatgcttgaccatgcctctcagggcatggtcaaggtgaggtttggatgatacgtgatagggttttaaggggctgcaaggcacatgggagccccttctctttggcctgcctgccttgctgcccctggcacgctctggcttgcttttggctgatgtttatctaaataaagacatcttaccgatgatggtaatattaccctagttccagaattctctttaaacctatgtctccctctttgatgttatcattttcttgctcttctctattcttcccctgagtagatcgtctggttccctcatgtcctcctcttcctccttcttcaaacaatgatttttttgcagaatttttaaaatttgaattagaaataagattgttttacatgacaatcccagttccctctccctcctgtcttcccctactcccccaactaaaacatacctatcacatatcccttctgctcccactggatggtgagaccttccatagggtgacatcagagtctatcctatcctttgggatagggcctaggcccacccccgtgtgtcttggctcagggagtattcctctatgtggaatgggctcccacattccatacctttgctagggataaggactgaactactgcaggaggtcccatcgatttctgaggtttcatcactgaaacccttgttcctggggtctggatcagtctcatgctggtatcccagctatcagtctggggtacaagagctcctcgatggtcaggtcagctgtttctatgggtttcaccagccttgtctggacccctttgctcttcactcgtccttctctgtatctggattccagttcagttcagtgattagttgtgggtgtctgctcctacttccaccagctgctggatgagggctatcgggtagcatataagtcagtcatcaatctcattatcagcggagggtatttaaggtagcctctcctctgttgcttagattgttagctggcaaacaatgaattttttagatactcaaatatctctttttttctttgtttcttgagacaaggtgtctctgttggatcctgtcctgacactccttctgtagaccaggctggcaggtaactcacaaagatccaccttcccctcccaagtgctgagattaaaagtgagagccaccactggccagcagatacccaaaaatcttaagcaaaccaaaatgtaaaaataaagatacagaaacaccaggggcagttaaatggctcagcaagtaaaggcatttgttatgcaagcctggtgaggtgagtcagatccctggaacccatgcaaaaagccagacatagaaatacaatccagagtacccttacagggagatgagacatacagagacaggatgctggtactgaagcttgtatgccagactgtctggaggaagcagcagaaacagtgaacaaccctacctcaaccttgcagaagtcaagaactgatccagaaagttttctgctgatctctatacacatactgtggaacacaaccaccaatacacacacacacacacacacacacacacacacacacacactaaacaacaaaataaaataattaggaataagtttagccataaaatggcagacatctacaataaaatattacactaaatagagaacaggagggcagtggtagtgcacacatttaatgccagcactcaggaggcagagtcaggtggatctctgagttggaggccagcctgatctacagagtgatggccaggccaatacacagaatttctctctcaaaacaacaaagaagaataagaataagaataagaataagaataagaataagaaaaagaagaaagaaagaaagaaagaaagaaagaaagaaaggaagaacttgagaaaaagaatttgaggcagacactaacagagggaaagacctcctatgacaatgtattgacagatattcagactgaatgtgcttaccataagcagcctaccatctttcaaatcaaggtgttctgctgggagaaactgacaaggaaaaactccctcggtactacaaaaatgtcggtataggcttcaagatacccaaggaggccatcaagggcatctacacagacaagaaatgcccgttcactggtcacatctccatccgagggcggatcctgtctggtggtgtaatgaagattcagagaatcattgccatgtgtcaggactatctcctttacacctgaaagtacaatcgctttgagaaggctacaagaacatgtctgtgtacctgtccccctgtttcagggatacagattggcaccattgccactatgggagagtgcaggctgagagcaagaccatgctattcaatgacctcaaggtgactaaggctgttgccaccgagaatcagtttcagaagttctgaaaggactctagctaactccctcgagcaaataaaattatattccagcttaaaaaaaaaaaaaagggagccgatacttcaaaacgcctgtaggaaaacagacagaacactttatgacacaaaataggtagtgactttctgaaaagaactccgttgagacaaaaaatactcccaaagactgacagagttgaataaaacggaaatacttttcatttatttttatttttgtttttttgagacaggtttctctgtggcattggaggatgtcctggaactagctcttgtagaccaggctggtcacgaactcacagagatcaaactgaaaaacttttagtaggaacaataactggaataaagatacaatttaaagaatgggaaatatatttgttgattatggattatacagatctacatatagaatatatagagttgtagaaaaagacaccaacaaaacaaaacatccgttcaataaatgttctgcaaaagtgatacacaaatattcaataaatatttgaaacctggttcagcatcctaaatcacaagggaaatgcaaagcaaaattgctttgagattccctctcaatctcgtcagaaaggccatcatcaagaaaacaaatgacaacaaataccagtgaaggtgtaggtaaaaagaaacacttatgcactgatgatgactgtgtgaatatgatgaaagttgctgtggagaattaaaaaaaaaaaaaaacctagcatatggcccagctacaccactgatgagtataagattaaaatacagtaagtcaataagccaaaaaaatattcgtgagaccatctgcagcaatgatgtcattatgaaatggtcccgactatgcatcagcagacggttagataatgaaaatgtggtatacatgcatgtgatactttgttcggacataaaataaagcaaagcatgccatttgcttgaaattgggtgcatcttgttagctgaaataaaaaagccatcctcaaaaagacaaaagtgtcatgttttctcctctttgaaaagcctaggttttatatagatgactaaaaccacaggccagaattggcagggaggagaatgggataatcagggcaggttggacagtgaagacagtgaaagcatatgaaagaccaaaagaggttcttctcaagacaccccaactaggacatgtgtcaattaaaaactagtaacaaatgtttaacaaagcatgatggcaattttatacagcacctgctaatggcaggcattctcgtaggtctcctttcatatttataaggtggtagcttttcatgtggaaaagaatcaaattcattccactatccagggcacctaggaaaatgaaaggagacacaaatgaatggcattcccatggggaaacatgaatataaacttccctgagcaaaacaggaaacaacaaaaccagcctctgaggtgggcgtatcatggcacccaagctacaagaaatgggctgagaagagttttatgaacatcctcaggacactaatggtatttggcaggaccaaggtacaaagccaagtccctggatcaagagtacacactcaactctttcttcctccttgccttcgccctctgggaggttgtttatggctcaggtaatggctttggccccacttccatgccttgtgacctccttgtagatgccccagttttcacatgaggattttacatgaagaatccctccttcctgccctgctgtagtcactttgagcagaaacatcttattgcctcccttagccacatcaaagataggccatgtcagcatcttctcttctctgcacatttccagggatatttccttcatgtgattccatggctctctctgacctctacccaaaatctccagaatctggtaacttcagaatatggctataaggttcttgtctttacattacagtcataaaatagatgcttactaaataagtgtatgactgactgtgggtgcacaatctaacttgaacagaggttccactgaacatatgacatggttcatcaccatcttcattaggaagtgaagttcccgtaaatagaaacctagaagcagaagttagtctcagctctaaaaaataaatgtctgtgtgaatccctggattgtgacgctaccaggttttgttagggtgagaatttagggtctagtggtcatgtatgcatagaaaggaaaagatatttgatccccaccattcaagtccctggtacctccatcttccccagaagggctactcaaacttttatccaaccagacacactatgttttgggacagaagctggatttgtaatttagggtacagtcagttagagccaccaagcaacttatcctccttggtcccctccaccaaatcctgaattgcacacaatttcacattacttgataagtgtggtcaaatgtttaggctttttacccatgagacagttgctatattttatcagttctctacagcaacgtctctgctttgtcagtaacttctgatccacaaagccagcatattcctactgctgttgccaccacatttgggactctgcattctgtagagctatttgaggagctgtatggagaaactgtatgaggatttcctttcctaaaacaaggaatctcgtctggtgacagtttcctttcctccatctgccaaaaggcactgaattttggatgatagcctttcattgttgcagcaatgacatgtggcttcaggaaagagaggcctgaaaacatgttccaatttacaaaacacatcatagccgtttaagatttattgtcatcattgttgtggtcattgaggatttctcctactttcattttcttcctccactctatttcttcctactcttctttccttctcattttctcttctatcaagttcagacagctacatgatctactccactctgacttggttaaatagctggaaagaatgaacttccatacccatcctaaaaaaaaaagagaattcactcacgatggagagcctttccaggatctttaagtttgagagagaatatagtaatatctaattacatccatagaaatcgctttttatttttatatttctcatgttcatagaatcctgtattatacattcagcacatctcccacactagaaatctagtctctgtcttctatatgtagacatccagtttttgccgcatatgtgtgtgtgtgtgtgtgtgtgtgtgtgtgtgtgtgtgtgtaaaaataataataaaggaggtggtcaaatttgagcggaatggtgagggcacagggaaagtttgaggtgcgagagggagcgatgggaatgatggaaatacagcattcatctaattctcaaaaaattagaaaaaagagaaaaccttaaaaacttaggtggctgaagttacatgggcttttctctgagtcttttgttccattgatcttcagaagcaaatgtcaatctgtgggttgtgacctaccctttcacaggggtcacatagcagatatgcaaatcagatatttacattacaattcataaccgctgcaaaattacagttatgaagtagcaacaaaataattttatagtaggggtcctctcaacaagagaaagtgtattaaagggcttcagcattaggaaggttgggaaccactggtctacagtttgctttaggctaggatgctattttcattactatggctctgttgtgtagtttgaagtcaggtattgtagtactcccagcattgtggataagtccgcttggttgtttgtttgccaagagttatattagcctttaggggtttttacaatccaattgaaagactgtttttgtctatttgtgtgcaaattttcttcagaattcttactggaattgcattaaattttagattgcttttgataggttggccatttttatattgactcctccaaacatgaacattggtggtctttccatgttctagctttttcttcagttccattttttagtgtcttaaagtttccattaaggaggtctttcatttcattggttaagtttattccaagtcattattacttttttccaaggcattatttttaaaccactgaattgcatactgtaatgggtgaattatacattcctcacctgtagctcgtaaagttagaaatgggttccatttactgaaatgattcattaaaatacagctttcttaaatattcctaggtaattttatcttgaaagtgaaaaagcagagaaaaagtgagcatgaaaggatcaatattgggaatgaaaaatgaccaaacacagtccttatcctcgcatagggataaggactgaactactacaggaggtcccgtagatttccgaggtttcctcacggaaacccttgttcctggggtctggatcagttccaggctggtttcccagtgatcagcctgggccaagatctccctcctgttcaggtcagctgtttctgtgggtttcaccacaacaaaggtctggacccctttgctcctaactcctccttctctgcaactagattccagttcagttcagttttaagctgagggtatctgcttctactttgatcagctgctggatgaaggctctaggatggtatataaattagccttcaatctctttatcacaggagggcatttaaggtagcctctccactgttgcttagatggttcgctgctgtcatccttgtagatctctgggcatttccctagtgcctgattttgctttaaacctatcctggctccctctttgatggaacctcttatttttctctcctctattcttccccctacacaaccttcctgttctcttagttcccctcacccctcctcttctccccttctcattctcttagcgccccctccacttcccccatgctcccaaattgctcaggagatcttgtctctttccccttctccaggggaccatgtatgtctcttttggagtccttcttgttgcctagcttctctggtgttgtggactataggctggtaaacctttgctctatgtgtaaaatctctttatgagtgactgcataccatgtttgtctttttgtgactgggttacctcgctctgaatggtttcttctagttccatccatttgcctgccaatttcaagattccattgcttttttttccctctgagtagtactccattgtgtaaatgtaccacatttctctatccattcctctggtgagggccatctaggttgcttccatgttctggctattacaaataatgctgctatgaatattattgaacagatgtcattgttgtatgaatgtgtttcttttgggtacattgcctaggagtggaattgctagatcttatggtaggctgatttccattttcctgaggaatcgccatactgatttccaaagtggctgtacaagtttgcactcccaccagcagtggaggagtgttcccctttctccccatcttctccagcataagttatcattgttgtttttgattttggccatttgactggaggaagatgatgtctcagagttgttttgagatgcatttccctgatggttaaggatgttgagcactttcttatgtgtctttcagccattttagattcctctgttgagaattcactatttagttctgtaccccaacttttaattgaattattatgtgtttaggaaactagcttcttgagttctttgcaaattttagagatcagcactctgtaagggttttcaaagaggacggttgctgctccaaaccctgttcacatagacagccctggttcaactgagtggttcccaaagaaaaacaataagacatgaatgtgggagaggaacttgtgggaaggcgggaggacagaagtgagagggggacaggagagtgctggggaaggtcagtcagaatgcacgatatacacctaggaaatcgcctaggcacaattttaatgggagggttttttaaagaaaaaatgaaatacagaattttgttatatttttttgtgccaaatatatatgaaagtgtgaaatgcagctcgtgcctaattttagctcacagcacatatcattcaatgaaaataaagatagtgacatgattgaacatttaatatatccaacacaatgatttcgacaatgagaattatcgttggaagaagttcaggggcctggggatagttgctaatcgataaggacaagtaaggcaaggaacacggacacatgagatcaagagactaacaagataaaaatcttgtgtctgaaagcctagatcacttaaggacaatgggaccagttgaaggaacaaggaacaagaaaagaatagttggctgatataccaaagaattaaaccaacagaagtaagcgatagtgtcaggaactgtgtgagctctgattatccgcagtgtgctttgctgtgcgatgactaatggtgctgtccttctcatcaatccacagaacaagctgccaagaacaaagctgacttctgcatagggacacctgagccctccttcccgggtactcacagctgcttgtccaaggctgaatcttcaatctccagtcaagtaaaggccttgcgaagtaaacaggacacagtttcacagagcaggatgtagaggggctccactctcatcccacacttatgtccctgtcctggcacctgctgggctggagagctattaagtggtttccatttctcaacaatacctcaatccacactgaagtgactgtgactgtgacttgggcttttacctggatacttggtggaggccattctctggagagtgaataatggtcactgggtgaaaaaaaaaaaaaaggcttgcttgtgaagctgtttaaggagaccatgaggagccccacagggaactttcacttctggtctgaagttgtctctctccaaaagtgacttgccttaggcttccaaatggagttcaaaactgcaggtgtctggcttcctacacatgtgtggggtaggttttatgtcacagatgctctaaaaccacattgcaaggatgattaagtcacagattctaggcattgatagtggcatctttggaaagaaggaaggtgtggggtagcagtgatagctgtcctgctcccagactcctgcaggacctcagatactgacacatgagcagagttggccactccaaatgtcatacaacacctaacagtaggagacatcttgagaatactctttctcggtgctttgtgcatattcatgatgaaagcaacccaaaggtctctagaagatagatcagagagagagacctccaatttagactgtgtctctctgaataatatctggttgtttatctctgaacctgttcccataagttgctagtggaagcctatttagtgacaactggacaaggcactagtctatagtatagcagaatatcattaggaatctcttcattgattcttttttcctctgtcatgtttgtttcttttatcctaggtctctgggttatccagtctctagttcctggccatgcaggcagtataaggcatgggctccctctggtggcatgggcttaaaagttaaagtaaacatttgctggccactcccacgagttctgtgccaccatttcttcagtacatcttgtaggcagggtagattgtaggcagagggtttgtgtccagttttctaattcgatagccttcagagtacattctaatgttactgacactagaaaataggagtgaagtctccaaacccgcaccatcttggcccttctatgtacaattaactgtgtggatgttgtcctagcaatggggtcttgttgtcagttttcaaagaatgatcttctgtcttaggatcaacctgagttgtttagggttcttcaagggacctcctcggacaacaactcaactaaatgtaaccatgtcccatcactggaagccttcctagcctggctacaaaagtgcccaggttcagactccacaccatccataactaggagtcctcagtagggtcatcctcacagatcccaggaagttcctacttcactaagttttcatacctccccaagtgccccccacttcccgttctctctccctatactctctccttccttcaccccactatgtgatcactcctgttcccatcctctccatccccagcccaccctcagaatctattctatttcccttcccagggagatccatgtttctcctctgtagccctcctctttccctaacctctctgagtctgaattgtagattgataatcattttacttaatggctaatatccacatgtaattgagtacataccatatttgtcaactttgacctataaacacaccactttatcacttcaaaacaaccttttctttgttgtttctcccccaaatctgacattaatattataatatgaaataaaataatacttcagagtcctacagggtttgaagaatgtcagtgatttattatgcaagatctctttaaaattcaagtctcctaactgtgctgtgctgtatgcctaagataaatagcacactttagtgcttgttctttgagagaattacacaacgtatttagatcatgctcatcacccatcccctacattcttcatatccaccccaaccttcgcccatccaacttcttgttctcatttttaagccataaagtccaatttatgcagcccaattattctttggtgtggggctatctcttggagcatggtgcctatcaggggttacaccaaaggaaaatagattctctctttctgaacagtcaagaattgtctatagctcttcatctaggggcaagactttgtgcccatctctaccctccaacctgggattttgtctcacttgagctggcactagttttgtagatgctgagacaacccctctgagttaatatgtgcaactgtcctgctgtgtccaggagacactatttcctagtatccatccactgcccctgtttcttacagtctttcctgctcctcttgtttctatatgattcctgagccttgggaagagggttttcatgtggatatcccattatgattaaacagtctcttattctctgaatattgaccagtgctgggtcattgtttctgtattgaagcagcctatctgcttagtattgagagatgcactaatgtataagaactatatctatatacaccatacctgtaacctataggaatggcattaggagttggattaattctacatctgtttaggagaattatactactccattctcccctagggcttaagacttatctagctccagatccttggccctggtaacagtaccaggaatagattcaatcttatgaagtgaatattaaatccaaacagaaagtagctgctcactcctgtgacgttcatgccaggattttgccagtgggcttatcatgccaggctagccttcactgtagcacttagcgtttacgtctggacaaagctgatgtttaattgtctcctctggcaatatgcacagcacattccagcagtagccagtggtcttcagatgaaaatcccaggtgactaccatcttcatttctcatttttctatggctgaagaatgtgggcatgtttttcttttaatcaccagggtcttacaatcaagttctggaatgtgaccaagagcaatggcaatagcccatggtgtttgggggtctgtaggaatgaacaaatctaaaagacttaacccattcctggtactgggccatttgctagcctatggtatccagttggggtattattcccccacatagagtaactccatttaaactcttttttatgtgtatgcacgtgtttaagatgcctccataatagaagtttaacatatgagttctttcagaatagcatcagtgttttttcataagaacctgtgatttttattccttaatataacaaggtatttatttctccattctttgtaaagtagtatgtgtaatatgggttgataatcatgcgacatataatttgtatcagatcagcaattgtctgtaaatatttaatttttatccaacgtgttttatttgaattagaaacaggattgttttacatggcaatcccagttcctttctccctcccatcctcccctaccgcccgccccaagtaaaatcctatctatcacataacctttcttctccccctggatggtggggtgttccatagggtgtcatcagagtctgtcatatcctttgggatagggcctaggcccacccctgtgtgtcttggctcagggagtattcctctatatggaatgggctcccaaagtccacacctatgctagggataagtactgaacttctacaggaggtcccgtagatttctcaggtttcctcatagaaacccatttttctggggtctggatcagtcccatgctggacctcagtgttttttaaccctcctcttactgtgtcctttttattgcttttcaattcctcactgcaatttgatgggggaatgtccttctgtatgctgtgattatatgtttctcttactggtttaatgaaatgctgattggccagtagccaggcagtaagtttggttggtgataccagactaggagaatgctggaaagaataaggcagtgagttagtcacaaggagacaccatgtagttacaggaaatataggacataaggcattctctggtaagccaagaccacatggaaatacatagtttaatagaaatgggttaatagttcatagagttagccaataagaatcctgagccattggccaaataatttataattattataagcctctgtgcatttctatggattaaatggctgtgggaacaggtggagcagtaacctgcttccacaccaatttaaccctttgtgttccatgattcccatttccctctttaaaacgttgtgttctatctcttctcccttgaatgtgtgaccaatgacatgaaggggatgctgtagccatgcctgcttaggggctggctgctggtgtgtctgaccatgcctgcaaggtagagtaagggacacttacgtggtaggttgctgtatggactgctgccctggctgctgtctaggtcgctctgtaagtaaggcttctccctattaaattcccttgtatttttacctggctccgtttggtaatttcccacattatctggttgtcagaagtggaatcttgtaaacgtaggccccatttgggagagcctgtgggttccaccagcacggtggcctaggtgggaaagttccctctctccacaggtgctcccggctctcagcggatccgctgcgccacacaagtgtgccccactaccgctgagctgctcagaacgtccacccagctgggagacttccacagactcaccacagttactgtcgcagtttctagctgcgttcatgaggccggcttggactgcaacctacctgtgcccagaagcctcctgtccttgagccaagtaggcctcgggagcagcctcggctttcaacagggtctgtagcttcccatggccgtggtggccgtaaagccgcatctctttctgtggttgtggctgcaaggacatactctaactaagataagcgcagctccactgccaaacatcttgcatgacccactgcggccaaaagccaagctgactaactgtacaccttcgccacctgctggagtaaaaataaggtaaaatcatggcagaatatttatcatttgctaaaattggtaatatttttgcttattatgtgaattcaatgtatgaggaggatgctaatctgccaattacctgcttatatgcagtaatggcagttagcttgctggtacaaataacattcctagccagaggtctcaggaacagggacaaagataacctcaccacctgcttgcagaaataacagcttaatgcaatgaggttttggaggacatattaggtcaggccacaattgtgcagcaaatagaacagaaattggatgataagcttggctctgtgtccaatacactaaagacagaggtgcctgttacccagcagcgtatttatgataggataaacacagggagatcctccatgtctgaggcattagaggctaggctgtcagaggaccgtgatgaactaaagaatatttgtagccagctagaaactcagatgggctctgtgacccagaaactagatggaaaggtgcaaaatacccaggatagggttgaagaattggacaatgccattcaatcaattattgaaacatctaaagtagcagatcacaaattggagtctagattcgaatgcttagaagataatggctgacagattagatacgtatataaggtcgattgctgaagactcaaaatcatcaaatcatgacctcaaatctagactcccatacctagtaggcagtttccaatccatccagatgctgcctaaggacgagtgtattaaagtcctagaaaaacggttagaggagcagctagagcaatttagagattcgctaacatgcttggaatcttttatgatgcaggaaattgaaacttttcatgaggatatcattactaggcttaaagatcattgggaagcctcagaggcagaatcactccaatctgaggcacctactccacccaggtatcatgactattcttctaaagttgttactcgtacaccaagtgtgtacccagctaccatggtagaaaagccggcttctaagaaacaccctcagggacagatggcttatgtatggcaaccattatgctgaatagtacgccattgtgtaaatataccacattttctctatccattttcagttgaggggcatctagtttgcttccaggttctggctattacaaataatgctgctatgaacatagttgagcatatgtcctaattgtttgagtgtgcattctttgggcatatgcccacgagaaggattgctggatcttgaggtagactgattcccaatttcctgagaaaccaccataatgctttccaaagtggctttacaagtc

SEQ ID NO: 23 - DNA, 5000 bp, synthetic construct
  source 1..5000: mol_type = other DNA; note = Hot spot 1 - 5000 base 5' end sequence of SEQ ID NO: 22
gctgtggatatggcttagttgaccagtggcttcctactgtgcctgaggccctgagatcaatttataaaaaaataaaataaaaaaaaaatctgaccactattacagattatttttagtattttaagtgtggttaatattcatcctaccaatatgacattacagcctgtgggtttggcctagcatttctcattcaaaagagttctgcattttttttccgaaaattgtgtgtgtgtgtgtgtgtgtgtgtgtgacctacatgtgctagtgcccaaagagactagtagaggtggtcattggattctctgaagcaagagttacctacagctgtgagctacctgacatgggtactgggaaccaaactcaggtcctatagaacagtaagcattcataacaatgaaccattgttcactctagcttctatgtataattctctctctctctctctctctctctctctctcctctctctctctctcctctctctctctcctctctctctctctctctctctctccctctctctctttctgttttttttaaagcaagatctcacataccccaggctgttcttgactcttaagtagcaaaagatgaccttgaaattctgatcctttgcctccacttcctgaatattggaattacagtctgagctccaagcctagctcaaaatttttctttctgttggtactggggggatggctcagtggttaaaaacattagctgctctaccaaaagacccaagcttcatttccagtacctacttggtgcctcacaatcctctgagactctagtcccaagggacatgatcatctgttttggcttctgcagtcaccaggtatagacatacatgcagacaagacattcatacatattttaaaaattatctttctttttaagtctttcttgtattgtggtatgggtgtgggtggtatgtacagtacacatgtgtctgtttatgtggctggataagtcccatatatgcacattcagaggccagaggttcacaacaggtgtcttactctattgctctccacattttaaaaaaattttctgccaggcagtgatgacccatgccttttatcccagcccttaggagacagaggcaggtggatctctgtgagttcaagaccagcctggtctacaagagctagttccaggacagcctccaaagccacagagaaaccctgtcttgaaaaaaaaaatgtttttctaagtatctatgtatgtttaacatatgttacagaaatataatgaaatctgtaccaagcattcttctacaggtggtaagattcatattgaagagcattgtaacatcattctcctgttacaaacctatttgttttctccaaaacaatgaaattatctgaattcagagtgctccatttcagcttctagatgaatgaacacatttgtttccattagcaacattatgcatatgctttacttgtgtattccatttgaaatgtgatcaataagaaggcagtcataattagtcaaacaagtcaaaaacgacttatgtagtctaataagcaaaaagcttataacagcttttcctgcctcaatgcctccaaaccccccgaagcaattgttaccaattttgtggaaaaattaatattgatatatttacagatatataaggaatttatgcacactgttacattttatttcatcagtttaaaatgttatttgttgacttatagatacgaggatttggttcctaagtttaccttcttttatactctctctgcccaggatactcaatattactgtgttggggtttggggtttttgtttgtttgtttgttttcttttttgagatgtgagtttctctgtgtggctttggagcctgtcctggaactcactctgtagaccaggctgggcttgaactcagagatagatccacctgcctctgcctccccagtactgggactaaaggtgtgcaccaccaccaccacctggctactatttttattaaatcagtattctgtgtttgggttattttgcctattcatggctgagcatttcattctagtggctgagctagggatcttacgattgtgtttatatgccaatctactttcatccagtggaacaagcatttagagaatcctttcagcctggcaactcatttccttcagttctcagaaatgcttttgaataattcatcaaacattctactcatttgctgtcttcttgcttctgaaactcttatgtattggatttccacttcccagcatgcactactattatctcttgacatattttttcaagtagtctgtatgtatattaaaaatagtatgatcacaactgagtagttttgcatcctggattaacataactgaagcattcttccaagaccttaaaagttgctcctaagcctcattcccatttgtctgatctttaagatttaagacttttgagtaatgtctgtgaacaactgagggtgccattctttattataagcatgtgtttctaactcctggagtcatgttaggttgttatgtctgtgggtatgaatactgaatactgaagagatcatcagtaaatatgtcttcatgcatctgtaaactatggagaaagcacagttcataaactgcttataaccttgtaaataacagtttaaaatgcttaaataacgtaggaatgtagttcagttggttgagtgcttatctaatttacacaaagccctgggtttaatccctagcgccatgtaaacccaggtatgatggtgcattcccataatcccactggggaggagaggtaggatgtaggatgattcaagtacatcctggactacatagtaaggtttgaagctacatgagactgtcttttaaaaaaaaaaaaaagataatatagagataatatagttttccaaatctagattttgattactgtcttttgggttttttggtttttttggttttgtttttgcctttttgagacagggtctctctgtgtggctttggagcctatcctggcactcactctgtaaaccaggctgcctccaactcacagagatccgcctgcctctgcttcccgagtgctgggattaaaggcgtgtgccaccaacacctggctctgtcttgtgttttcaaatagtataatttcagtagctaaagttaatggggaaaaggaaaaagagattgcctgttcaaattttggcttgctgttaggtcgggaacatacccagactttctcctgacctaaacactttttttgtttttgtttttgtgacagggtttctctgtgtgtagactgtattggaactcactttgtagaccaggctggcctcaaactcacagagatccacctacctatgccacccgagtactgggattaaaagcgtgtgccaccaacgctgggcttcccaaacacttcctattggtgttttcccatgtgtttatccctcaattgttctcaaattgtgtttaaattgccatgacactgctaaggtcatttcctaatagggaccctctctagccactttttctaagacagctcccccaaactctctcagggccccttttattcctttccatacacagaaaaagaatatatttaatttgttgttctccattctttctgtccttagacagggtttcatgtagctcaggctggcctagaacttgcttcgtagccaaggatggccttgaactgctgagcctccagcctcctccattcatgtttgttcattttgtgcagaattctgttcagattacagagttgactttttgtgtattttctgttagtgggcatttagattgtttctagtttgggactatagctaattttgctgttatgaatatgatagtacatgtattttcatgcacatttgttcatgttttgttgggcttatttatagataaaattgaaaccaatggctattttaaagcatagtttcagtgggtactactcaacaggttttcatggcttttgtctgtcttcatgctagtatcatattatcttaaccactacagcttaataatgatattagtaatgcttggtataaatgcttcatattccttttcaaaacaccttgcataatggctcatacctagcacttgggaagctgaagcaggagagtcattgagttcaaggtcagtctgggcttcatagtatcttctggtcacctgggatgaaaaaaaaacagacaagaccctatgtgctgcctccaccacctcactatatatctgacttcatgtgtcctcctccagggtctagcatgataagtgtgggccccactccccatcaaggaaacttctatttgcaacagagagagatcattacagaaagccacaaccaaccaaaatacagagttgtagagccctgtcccagtggctacatctacaactcctgcaccaaaggctcaggtaacattgtggaagaggcagagggtccctttacggagagattatgtctgctagtgacatcagaagccatacctggggctgagagatggctcagaggttaagagcactgactgctcttccagaggtcctgagttcaattcccagcaaccacatggtgggtaacaaccatctgttatgatatctggtgccctcttctggtgtgcagatatacatggaagcagaatgttgtatacataataaacaaataaataaaaaaaagaatgtttaaaagaaaaaaaaaagaagccatacctgtaaagtctcatcaacaggatggcccaaatgtagctagacaagcacggacaccaacaaacatgccaaactgcatgggaaaaggctaggaggtcttaaccctacacaaacaactgagacaactggggaaagctgggggcaggacacgtcatcttccccagggaagagcacacccaatttgttttccagtgctaaatggtcagccctgaaaacatgcacacagtaacactgtgtggactcagcaggttatatttagaaatatatacagatatgtatgcagtgacaattgatgaaaagagaggcaattaatttgaaggagagctgggagggaaatatgggaa

SEQ ID NO: 24 - DNA, 5000 bp, synthetic construct
  source 1..5000: mol_type = other DNA; note = Hot spot 1 - 5000 base 3' end sequence of SEQ ID NO: 22
aaaagtgcccaggttcagactccacaccatccataactaggagtcctcagtagggtcatcctcacagatcccaggaagttcctacttcactaagttttcatacctccccaagtgccccccacttcccgttctctctccctatactctctccttccttcaccccactatgtgatcactcctgttcccatcctctccatccccagcccaccctcagaatctattctatttcccttcccagggagatccatgtttctcctctgtagccctcctctttccctaacctctctgagtctgaattgtagattgataatcattttacttaatggctaatatccacatgtaattgagtacataccatatttgtcaactttgacctataaacacaccactttatcacttcaaaacaaccttttctttgttgtttctcccccaaatctgacattaatattataatatgaaataaaataatacttcagagtcctacagggtttgaagaatgtcagtgatttattatgcaagatctctttaaaattcaagtctcctaactgtgctgtgctgtatgcctaagataaatagcacactttagtgcttgttctttgagagaattacacaacgtatttagatcatgctcatcacccatcccctacattcttcatatccaccccaaccttcgcccatccaacttcttgttctcatttttaagccataaagtccaatttatgcagcccaattattctttggtgtggggctatctcttggagcatggtgcctatcaggggttacaccaaaggaaaatagattctctctttctgaacagtcaagaattgtctatagctcttcatctaggggcaagactttgtgcccatctctaccctccaacctgggattttgtctcacttgagctggcactagttttgtagatgctgagacaacccctctgagttaatatgtgcaactgtcctgctgtgtccaggagacactatttcctagtatccatccactgcccctgtttcttacagtctttcctgctcctcttgtttctatatgattcctgagccttgggaagagggttttcatgtggatatcccattatgattaaacagtctcttattctctgaatattgaccagtgctgggtcattgtttctgtattgaagcagcctatctgcttagtattgagagatgcactaatgtataagaactatatctatatacaccatacctgtaacctataggaatggcattaggagttggattaattctacatctgtttaggagaattatactactccattctcccctagggcttaagacttatctagctccagatccttggccctggtaacagtaccaggaatagattcaatcttatgaagtgaatattaaatccaaacagaaagtagctgctcactcctgtgacgttcatgccaggattttgccagtgggcttatcatgccaggctagccttcactgtagcacttagcgtttacgtctggacaaagctgatgtttaattgtctcctctggcaatatgcacagcacattccagcagtagccagtggtcttcagatgaaaatcccaggtgactaccatcttcatttctcatttttctatggctgaagaatgtgggcatgtttttcttttaatcaccagggtcttacaatcaagttctggaatgtgaccaagagcaatggcaatagcccatggtgtttgggggtctgtaggaatgaacaaatctaaaagacttaacccattcctggtactgggccatttgctagcctatggtatccagttggggtattattcccccacatagagtaactccatttaaactcttttttatgtgtatgcacgtgtttaagatgcctccataatagaagtttaacatatgagttctttcagaatagcatcagtgttttttcataagaacctgtgatttttattccttaatataacaaggtatttatttctccattctttgtaaagtagtatgtgtaatatgggttgataatcatgcgacatataatttgtatcagatcagcaattgtctgtaaatatttaatttttatccaacgtgttttatttgaattagaaacaggattgttttacatggcaatcccagttcctttctccctcccatcctcccctaccgcccgccccaagtaaaatcctatctatcacataacctttcttctccccctggatggtggggtgttccatagggtgtcatcagagtctgtcatatcctttgggatagggcctaggcccacccctgtgtgtcttggctcagggagtattcctctatatggaatgggctcccaaagtccacacctatgctagggataagtactgaacttctacaggaggtcccgtagatttctcaggtttcctcatagaaacccatttttctggggtctggatcagtcccatgctggacctcagtgttttttaaccctcctcttactgtgtcctttttattgcttttcaattcctcactgcaatttgatgggggaatgtccttctgtatgctgtgattatatgtttctcttactggtttaatgaaatgctgattggccagtagccaggcagtaagtttggttggtgataccagactaggagaatgctggaaagaataaggcagtgagttagtcacaaggagacaccatgtagttacaggaaatataggacataaggcattctctggtaagccaagaccacatggaaatacatagtttaatagaaatgggttaatagttcatagagttagccaataagaatcctgagccattggccaaataatttataattattataagcctctgtgcatttctatggattaaatggctgtgggaacaggtggagcagtaacctgcttccacaccaatttaaccctttgtgttccatgattcccatttccctctttaaaacgttgtgttctatctcttctcccttgaatgtgtgaccaatgacatgaaggggatgctgtagccatgcctgcttaggggctggctgctggtgtgtctgaccatgcctgcaaggtagagtaagggacacttacgtggtaggttgctgtatggactgctgccctggctgctgtctaggtcgctctgtaagtaaggcttctccctattaaattcccttgtatttttacctggctccgtttggtaatttcccacattatctggttgtcagaagtggaatcttgtaaacgtaggccccatttgggagagcctgtgggttccaccagcacggtggcctaggtgggaaagttccctctctccacaggtgctcccggctctcagcggatccgctgcgccacacaagtgtgccccactaccgctgagctgctcagaacgtccacccagctgggagacttccacagactcaccacagttactgtcgcagtttctagctgcgttcatgaggccggcttggactgcaacctacctgtgcccagaagcctcctgtccttgagccaagtaggcctcgggagcagcctcggctttcaacagggtctgtagcttcccatggccgtggtggccgtaaagccgcatctctttctgtggttgtggctgcaaggacatactctaactaagataagcgcagctccactgccaaacatcttgcatgacccactgcggccaaaagccaagctgactaactgtacaccttcgccacctgctggagtaaaaataaggtaaaatcatggcagaatatttatcatttgctaaaattggtaatatttttgcttattatgtgaattcaatgtatgaggaggatgctaatctgccaattacctgcttatatgcagtaatggcagttagcttgctggtacaaataacattcctagccagaggtctcaggaacagggacaaagataacctcaccacctgcttgcagaaataacagcttaatgcaatgaggttttggaggacatattaggtcaggccacaattgtgcagcaaatagaacagaaattggatgataagcttggctctgtgtccaatacactaaagacagaggtgcctgttacccagcagcgtatttatgataggataaacacagggagatcctccatgtctgaggcattagaggctaggctgtcagaggaccgtgatgaactaaagaatatttgtagccagctagaaactcagatgggctctgtgacccagaaactagatggaaaggtgcaaaatacccaggatagggttgaagaattggacaatgccattcaatcaattattgaaacatctaaagtagcagatcacaaattggagtctagattcgaatgcttagaagataatggctgacagattagatacgtatataaggtcgattgctgaagactcaaaatcatcaaatcatgacctcaaatctagactcccatacctagtaggcagtttccaatccatccagatgctgcctaaggacgagtgtattaaagtcctagaaaaacggttagaggagcagctagagcaatttagagattcgctaacatgcttggaatcttttatgatgcaggaaattgaaacttttcatgaggatatcattactaggcttaaagatcattgggaagcctcagaggcagaatcactccaatctgaggcacctactccacccaggtatcatgactattcttctaaagttgttactcgtacaccaagtgtgtacccagctaccatggtagaaaagccggcttctaagaaacaccctcagggacagatggcttatgtatggcaaccattatgctgaatagtacgccattgtgtaaatataccacattttctctatccattttcagttgaggggcatctagtttgcttccaggttctggctattacaaataatgctgctatgaacatagttgagcatatgtcctaattgtttgagtgtgcattctttgggcatatgcccacgagaaggattgctggatcttgaggtagactgattcccaatttcctgagaaaccaccataatgctttccaaagtggctttacaagtc

SEQ ID NO: 25 - DNA, 14 bp, synthetic construct
  source 1..14: mol_type = other DNA; note = Alu central region
aaaaatacaaaaaa

SEQ ID NO: 26 - DNA, 11 bp, synthetic construct
  source 1..11: mol_type = other DNA; note = Alu Promoter Box A
tggctcacgcc

SEQ ID NO: 27 - skipped

SEQ ID NO: 28 - DNA, 34 bp, synthetic construct
  source 1..34: mol_type = other DNA; note = L3 Lox site
ataacttcgtataaagtctcctatacgaagttat

SEQ ID NO: 29 - DNA, 34 bp, synthetic construct
  source 1..34: mol_type = other DNA; note = LoxFAS Lox site
ataacttcgtatagaaaggtatatacgaagttat

SEQ ID NO: 30 - DNA, 34 bp, synthetic construct; identical to SEQ ID NO: 1
  source 1..34: mol_type = other DNA; note = 2L Lox site

SEQ ID NO: 31 - DNA, 34 bp, synthetic construct
  source 1..34: mol_type = other DNA; note = a0 Lox site
taccgttcgtataatgtatgctatacgaagttat

SEQ ID NO: 32 - DNA, 34 bp, synthetic construct
  source 1..34: mol_type = other DNA; note = a1 Lox site
taccgttcgtatagtatagtatatacgaagttat

SEQ ID NO: 33 - DNA, 34 bp, synthetic construct
  source 1..34: mol_type = other DNA; note = a2 Lox site
taccgttcgtataggctatagtatacgaagttat

SEQ ID NO: 34 - DNA, 34 bp, synthetic construct
  source 1..34: mol_type = other DNA; note = a3 Lox site
taccgttcgtatattgtatggtatacgaagttat

SEQ ID NO: 35 - DNA, 34 bp, synthetic construct
  source 1..34: mol_type = other DNA; note = a4 Lox site
taccgttcgtataggatagtatatacgaagttat

SEQ ID NO: 36 - DNA, 34 bp, synthetic construct
  source 1..34: mol_type = other DNA; note = a5 Lox site
taccgttcgtataacatacgctatacgaagttat

SEQ ID NO: 37 - DNA, 34 bp, synthetic construct
  source 1..34: mol_type = other DNA; note = a6 Lox site
taccgttcgtatagggtaggctatacgaagttat

SEQ ID NO: 38 - DNA, 34 bp, synthetic construct
  source 1..34: mol_type = other DNA; note = a7 Lox site
taccgttcgtataatgtatactatacgaagttat

SEQ ID NO: 39 - DNA, 34 bp, synthetic construct
  source 1..34: mol_type = other DNA; note = a8 Lox site
taccgttcgtataggatactttatacgaagttat

SEQ ID NO: 40 - DNA, 34 bp, synthetic construct
  source 1..34: mol_type = other DNA; note = a9 Lox site
taccgttcgtataagaaaccatatacgaagttat

SEQ ID NO: 41 - DNA, 34 bp, synthetic construct
  source 1..34: mol_type = other DNA; note = a10 Lox site
taccgttcgtatataataccatatacgaagttat

SEQ ID NO: 42 - DNA, 34 bp, synthetic construct
  source 1..34: mol_type = other DNA; note = a11 Lox site
taccgttcgtataaccaaagatatacgaagttat

SEQ ID NO: 43 - DNA, 34 bp, synthetic construct
  source 1..34: mol_type = other DNA; note = a12 Lox site
taccgttcgtataaccataattatacgaagttat

SEQ ID NO: 44 - DNA, 34 bp, synthetic construct
  source 1..34: mol_type = other DNA; note = b0 Lox site
ataacttcgtataatgtatgctatacgaacggta

SEQ ID NO: 45 - DNA, 34 bp, synthetic construct
  source 1..34: mol_type = other DNA; note = b1 Lox site
ataacttcgtatagtatagtatatacgaacggta

SEQ ID NO: 46 - DNA, 34 bp, synthetic construct
  source 1..34: mol_type = other DNA; note = b2 Lox site
ataacttcgtataggctatagtatacgaacggta

SEQ ID NO: 47 - DNA, 34 bp, synthetic construct
  source 1..34: mol_type = other DNA; note = b3 Lox site
ataacttcgtatattgtatggtatacgaacggta

SEQ ID NO: 48 - DNA, 34 bp, synthetic construct
  source 1..34: mol_type = other DNA; note = b4 Lox site
ataacttcgtataggatagtatatacgaacggta

SEQ ID NO: 49 - DNA, 34 bp, synthetic construct
  source 1..34: mol_type = other DNA; note = b5 Lox site
ataacttcgtataacatacgctatacgaacggta

SEQ ID NO: 50 - DNA, 34 bp, synthetic construct
  source 1..34: mol_type = other DNA; note = b6 Lox site
ataacttcgtatagggtaggctatacgaacggta

SEQ ID NO: 51 - DNA, 34 bp, synthetic construct
  source 1..34: mol_type = other DNA; note = b7 Lox site
ataacttcgtataatgtatactatacgaacggta

SEQ ID NO: 52 - DNA, 34 bp, synthetic construct
  source 1..34: mol_type = other DNA; note = b8 Lox site
ataacttcgtataggatactttatacgaacggta

SEQ ID NO: 53 - DNA, 34 bp, synthetic construct
  source 1..34: mol_type = other DNA; note = b9 Lox site
ataacttcgtataagaaaccatatacgaacggta

SEQ ID NO: 54 - DNA, 34 bp, synthetic construct
  source 1..34: mol_type = other DNA; note = b10 Lox site
ataacttcgtatataataccatatacgaacggta

SEQ ID NO: 55 - DNA, 34 bp, synthetic construct
  source 1..34: mol_type = other DNA; note = b11 Lox site
ataacttcgtataaccaaagatatacgaacggta

SEQ ID NO: 56 - DNA, 34 bp, synthetic construct
  source 1..34: mol_type = other DNA; note = b12 Lox site
ataacttcgtataaccataattatacgaacggta

SEQ ID NO: 57 - DNA, 34 bp, synthetic construct
  source 1..34: mol_type = other DNA; note = c0 Lox site
ataaattgctataatgtatgctatacgaagttat

SEQ ID NO: 58 - DNA, 34 bp, synthetic construct
  source 1..34: mol_type = other DNA; note = c1 Lox site
ataaattgctatagtatagtatatacgaagttat

SEQ ID NO: 59 - DNA, 34 bp, synthetic construct
  source 1..34: mol_type = other DNA; note = c2 Lox site
ataaattgctataggctatagtatacgaagttat

SEQ ID NO: 60 - DNA, 34 bp, synthetic construct
  source 1..34: mol_type = other DNA; note = c3 Lox site
ataaattgctatattgtatggtatacgaagttat

SEQ ID NO: 61 - DNA, 34 bp, synthetic construct
  source 1..34: mol_type = other DNA; note = c4 Lox site
ataaattgctataggatagtatatacgaagttat

SEQ ID NO: 62 - DNA, 34 bp, synthetic construct
  source 1..34: mol_type = other DNA; note = c5 Lox site
ataaattgctataacatacgctatacgaagttat

SEQ ID NO: 63 - DNA, 34 bp, synthetic construct
  source 1..34: mol_type = other DNA; note = c6 Lox site
ataaattgctatagggtaggctatacgaagttat

SEQ ID NO: 64 - DNA, 34 bp, synthetic construct
  source 1..34: mol_type = other DNA; note = c7 Lox site
ataaattgctataatgtatactatacgaagttat

SEQ ID NO: 65 - DNA, 34 bp, synthetic construct
  source 1..34: mol_type = other DNA; note = c8 Lox site
ataaattgctataggatactttatacgaagttat

SEQ ID NO: 66 - DNA, 34 bp, synthetic construct
  source 1..34: mol_type = other DNA; note = c9 Lox site
ataaattgctataagaaaccatatacgaagttat

SEQ ID NO: 67 - DNA, 34 bp, synthetic construct
  source 1..34: mol_type = other DNA; note = c10 Lox site
ataaattgctatataataccatatacgaagttat

SEQ ID NO: 68 - DNA, 34 bp, synthetic construct
  source 1..34: mol_type = other DNA; note = c11 Lox site
ataaattgctataaccaaagatatacgaagttat

SEQ ID NO: 69 - DNA, 34 bp, synthetic construct
  source 1..34: mol_type = other DNA; note = c12 Lox site
ataaattgctataaccataattatacgaagttat

SEQ ID NO: 70 - DNA, 34 bp, synthetic construct
  source 1..34: mol_type = other DNA; note = d0 Lox site
ataacttcgtataatgtatgctatacgaataatt

SEQ ID NO: 71 - DNA, 34 bp, synthetic construct
  source 1..34: mol_type = other DNA; note = d1 Lox site
ataacttcgtatagtatagtatatacgaataatt

SEQ ID NO: 72 - DNA, 34 bp, synthetic construct
  source 1..34: mol_type = other DNA; note = d2 Lox site
ataacttcgtataggctatagtatacgaataatt

SEQ ID NO: 73 - DNA, 34 bp, synthetic construct
  source 1..34: mol_type = other DNA; note = d3 Lox site
ataacttcgtatattgtatggtatacgaataatt

SEQ ID NO: 74 - DNA, 34 bp, synthetic construct
  source 1..34: mol_type = other DNA; note = d4 Lox site
ataacttcgtataggatagtatatacgaataatt

SEQ ID NO: 75 - DNA, 34 bp, synthetic construct
  source 1..34: mol_type = other DNA; note = d5 Lox site
ataacttcgtataacatacgctatacgaataatt

SEQ ID NO: 76 - DNA, 34 bp, synthetic construct
  source 1..34: mol_type = other DNA; note = d6 Lox site
ataacttcgtatagggtaggctatacgaataatt

SEQ ID NO: 77 - DNA, 34 bp, synthetic construct
  source 1..34: mol_type = other DNA; note = d7 Lox site
ataacttcgtataatgtatactatacgaataatt

SEQ ID NO: 78 - DNA, 34 bp, synthetic construct
  source 1..34: mol_type = other DNA; note = d8 Lox site
ataacttcgtataggatactttatacgaataatt

SEQ ID NO: 79 - DNA, 34 bp, synthetic construct
  source 1..34: mol_type = other DNA; note = d9 Lox site
ataacttcgtataagaaaccatatacgaataatt

SEQ ID NO: 80 - DNA, 34 bp, synthetic construct
  source 1..34: mol_type = other DNA; note = d10 Lox site
ataacttcgtatataataccatatacgaataatt

SEQ ID NO: 81 - DNA, 34 bp, synthetic construct
  source 1..34: mol_type = other DNA; note = d11 Lox site
ataacttcgtataaccaaagatatacgaataatt

SEQ ID NO: 82 - DNA, 34 bp, synthetic construct
  source 1..34: mol_type = other DNA; note = d12 Lox site
ataacttcgtataaccataattatacgaataatt

SEQ ID NO: 83 - DNA, 34 bp, synthetic construct
  source 1..34: mol_type = other DNA; note = F3 FRT site
gaagttcctattcttcaaatagtataggaacttc

SEQ ID NO: 84 - DNA, 34 bp, synthetic construct
  source 1..34: mol_type = other DNA; note = F5 FRT site
gaagttcctattcttcaaaaggtataggaacttc

SEQ ID NO: 85 - DNA, 34 bp, synthetic construct
  source 1..34: mol_type = other DNA; note = F10 FRT site
gaagttcctattcactagaatgtataggaacttc

SEQ ID NO: 86 - DNA, 34 bp, synthetic construct
  source 1..34: mol_type = other DNA; note = F11 FRT site
gaagttcctattctgaactaagtataggaacttc

SEQ ID NO: 87 - DNA, 34 bp, synthetic construct
  source 1..34: mol_type = other DNA; note = F12 FRT site
gaagttcctattctttctgaagtataggaacttc

SEQ ID NO: 88 - DNA, 34 bp, synthetic construct
  source 1..34: mol_type = other DNA; note = F13 FRT site
gaagttcctattctcatataagtataggaacttc

SEQ ID NO: 89 - DNA, 34 bp, synthetic construct
  source 1..34: mol_type = other DNA; note = F14 FRT site
gaagttcctattctatcagaagtataggaacttc

SEQ ID NO: 90 - DNA, 34 bp, synthetic construct
  source 1..34: mol_type = other DNA; note = F15 FRT site
gaagttcctattcttataggagtataggaacttc

SEQ ID NO: 91 - DNA, 34 bp, synthetic construct
  source 1..34: mol_type = other DNA; note = F16 FRT site
gaagttcctattctccgggcagtataggaacttc

SEQ ID NO: 92 - DNA, 35 bp, synthetic construct
  source 1..35: mol_type = other DNA; note = fC31_attB34 attB site
ggtgccagggcgtgcccttgggctccccgggcgcg

SEQ ID NO: 93 - DNA, 39 bp, synthetic construct
  source 1..39: mol_type = other DNA; note = fC31_attP39 attP site
ccccaactggggtaacctttgagttctctcagttggggg

SEQ ID NO: 94 - DNA, 51 bp, synthetic construct
  source 1..51: mol_type = other DNA; note = fC31_attB51 attB site
ccgcggtgcgggtgccagggcgtgcccttgggctccccgggcgcgtactcc

SEQ ID NO: 95 - DNA, 50 bp, synthetic construct
  source 1..50: mol_type = other DNA; note = fC31_attP50 attP site
agtagtgccccaactggggtaacctttgagttctctcagttgggggcgta

SEQ ID NO: 96 - DNA, 46 bp, synthetic construct
  source 1..46: mol_type = other DNA; note = BxB1_attB attB site
ggccggcttgtcgacgacggcggtctccgtcgtcaggatcatccgg

SEQ ID NO: 97 - DNA, 52 bp, synthetic construct
  source 1..52: mol_type = other DNA; note = BxB1_attP attP site
gtggtttgtctggtcaaccaccgcggtctcagtggtgtacggtacaaaccca

SEQ ID NO: 98 - DNA, 54 bp, synthetic construct
  source 1..54: mol_type = other DNA; note = Bxb1-GA_attB attB site
cggccggcttgtcgacgacggcggactccgtcgtcaggatcatccggccgccac

SEQ ID NO: 99 - DNA, 54 bp, synthetic construct
  source 1..54: mol_type = other DNA; note = Bxb1-GA_attP attP site
cgtggtttgtctggtcaaccaccgcggactcagtggtgtacggtacaaacccat

SEQ ID NO: 100 - DNA, 57 bp, synthetic construct
  source 1..57: mol_type = other DNA; note = R4_attB attB site
gcgcccaagttgcccatgaccatgccgaagcagtggtagaagggcaccggcagacac

SEQ ID NO: 101 - DNA, 61 bp, synthetic construct
  source 1..61: mol_type = other DNA; note = R4_attP attP site
aggcatgttccccaaagcgataccacttgaagcagtggtactgcttgtgggtacactctgc

SEQ ID NO: 102 - DNA, 60 bp, synthetic construct
  source 1..60: mol_type = other DNA; note = fBT1_attB attB site
gtccttgaccaggtttttgacgaaagtgatccagatgatccagctccacaccccgaacgc

SEQ ID NO: 103 - DNA, 59 bp, synthetic construct
  source 1..59: mol_type = other DNA; note = fBT1_attP attP site
ggtgctgggttgttgtctctggacagtgatccatgggaaactactcagcaccaccaatg

SEQ ID NO: 104 - DNA, 61 bp, synthetic construct
  source 1..61: mol_type = other DNA; note = WB_attB attB site
aaggtagcgtcaacgataggtgtaactgtcgtgtttgtaacggtacttccaacagctggcg

SEQ ID NO: 105 - DNA, 61 bp, synthetic construct
  source 1..61: mol_type = other DNA; note = WB_attP attP site
tagttttaaagttggttattagttactgtgatatttatcacggtacccaataaccaatgaa

SEQ ID NO: 106 - DNA, 62 bp, synthetic construct
  source 1..62: mol_type = other DNA; note = SPBc_attB attB site
agtgcagcatgtcattaatatcagtacagataaagctgtatctcctgtgaacacaatgggtg

SEQ ID NO: 107 - DNA, 55 bp, synthetic construct
  source 1..55: mol_type = other DNA; note = SPBc_attP attP site
aaagtagtaagtatcttaaaaaacagataaagctgtatattaagatacttactac

SEQ ID NO: 108 - DNA, 54 bp, synthetic construct
  source 1..54: mol_type = other DNA; note = TP901_attB attB site
tgataattgccaacacaattaacatctcaatcaaggtaaatgctttttcgtttt

SEQ ID NO: 109 - DNA, 54 bp, synthetic construct
  source 1..54: mol_type = other DNA; note = TP901_attP attP site
aattgcgagtttttatttcgtttatttcaattaaggtaactaaaaaactccttt

SEQ ID NO: 110-113 - skipped (4 entries)

SEQ ID NO: 114 - DNA, 500 bp, synthetic construct
  source 1..500: mol_type = other DNA; note = Hot spot 2 - 5' homologous recombination polynucleotide sequence (3' junction)
gcgatctccctgccatgtctccaggtgaacagcacaatttgaaaaggaagctgccacgcaagtgcagttttcacacttgaaacccagcttgggagagaggaagagttagaaaacaatctgaactgctcagttttgtgcgaaatattaaacagtgacataaaatgtttgtattttgagatatgtgtgaccacattgatatctgggtaccacttactgacatgtatcctaccagattctaacaaatgtcttatcagcatagtctcatggcctcttgacatccatcttatgtggatgagggatgcagtgtcttcaatgtattcataatagcctgaaactgaaaacaacctagatgtctctcaaccaaagaatggataaaaaaagatgtagtacatttacataatggagtattactgttaagaaaagtgacatcatgttaagaaaatgacatcatgaaatttgtggacaaatggatgcaactagaaaaaatataccgtgagtga

SEQ ID NO: 115 - DNA, 500 bp, synthetic construct
  source 1..500: mol_type = other DNA; note = Hot spot 2 - 3' homologous recombination polynucleotide sequence (3' junction)
tgggtcttaaactgaccataaaaagatacaggctaacagaatggatacacagacaaaatccatcctgctgtatgcaagaaacacacctcaacttcaaagacaggtgttacctcagagtaaagggttgggaaaagattttccaatcaaatgggcccaagaaacaaactggtgtagcaatcctaatatctaacaattcagacttccaactaaaatcaattaaaagagatgaagaagagcattttatattcatcaaaggaaaagtccatcaagatgaagtctcaatcctgaacatctatgccccaaataggaaggcacccacatttgtaaaagaaacattacaaaagctcaaactacacataaaaccacacacacttatagtaggagacttcaacaccctgctttcaccactgtacaggaccaccaaacacaaacttaaaaagaaacaaatgatctaacagaagttataacccacctgggtttaacaggtatctatagagcat

SEQ ID NO: 116 - DNA, 184037 bp, synthetic construct
  source 1..184037: mol_type = other DNA; note = Hot spot 2 - subsequence of Chromosome 5 of Cricetulus griseus
atgttggctgtatattgcttttatcaggtttagatatgttcctgttattcctgttctctccaagatctttatcatgaagggatgttggattttgtcaaaggctttttcagcatccagtgagatgttcatgtggtttttcttttacagtttgtttatatggtggattacactgatggattttcatatgttgaaccatccttgcatccctgtaatgaagcctacttgattcatggtagatgatttctctaatgtgttcttggatttgatttgccaatattttgttgagtaattttgcatgagggatattggtctatagttctcttttttagttgtatctttgtgtggcttggtatcaaagtgattgtagccatgtaaaaaaagtttggcaatgtcccttctgcttctattgtgtggaacaatttgagaagtactggtattagctcttgtttgaatttctggtagaattctgcagtgaagccatctggccctgggctttttttagttggaaggcttttgatgactgcttcttttttattaggggttataggtcaatttaaactgctaatctgttcttggtttaattttggtaagtgatatctattccggaaactgtccatttcctttagattttcgaattttgtggagtacaggttttcaaagtatgatctgatgattctctgaatttcctcagtgtctgttgttatatcccctttttcgtttttgattttgttaattagcatgctctgtctctgccttttggttagtttggatagaggtttgtctatcttgttgatattttcaaagaaccaactctttgtttcattgattctttgtaatgttttcctagtttctactttattaatttcagacttcagtttgattatttcctggcatctacttctctgtggtgagtttgcttccttttgctctaaagctttcagttgttctgtcaattctctagtgtgactattctccagtttcttcatgtgggcacttggtgctatgaacttaactcttagcactgcttgcagagtgtcccataagtgtggttatgttgtgtctacatactcatactcattaaattctaggaagtcttcaatttcttttttatttcttcctcaacccaggaatggtgcaattgggtgttattcaatttccacaggtttgtaggttttctgcaatttgtattgctgtttaattccagctttaaaccatggtgatctgataggatacaggaggttatttcaattcttttgtatctgtggaggtttgctttgctgccaattacgtggtcaattttagagaaggttccatgtggacctgagaagaaggtatattcttttgtgtttggatgaaatattctacagatgtctgttaaacccaattgggtcataacttctattagaccctttgtttctttgttaagtttctgtctgatggttctgtctggtggtgaaagcaggctgttgaagtctcctactatcagtgtgtgtggtattatgtgtgatttgagctttagtaatgtttcttttacaaatgtgggtgcctttgtatttgggacatagatgttcaggattgagacttcatcttgatggacttttcctgtaatgagtatgaaatgcccttcttcatctcttttgattggttttagtttgaagtgtaatttgctagatattaggattgctacacgagctagtttcttgggctcatttgattggaaaatcttttcccaaccctttactctgaggtattccctgtctttgaagctgaggtgtgtttcttgtattcagcagaaggatggattctgtcttcgtatccattctgcttgcctgtatctttttatgggcaggttaagaccattgacattgagggatattaatgtccattgattgttggttcttgcctgttttggatttattgttggtgatgtcattgtatgtggattttgccctcctgtttcttttttgtgtttggtaaaattggattatctattgcctatgtttttgtgagtatagttatcttccttgggttgaagtttttcttctagaaatttctttagtgctggatttgtggatatgtattgtttaaatctggttttgtcatggaatatcttgttttctccatctatagtcattgaaagttttgttgggtacagtagtctgggttggtgtcgatgctccattagtgtttgtaggatatctatccaggaccttctggcttttaaagtttctattgagaagtcaggtgtgattctgacaggtctgcctttatatgttacttggcctttttcctttgctgctcttaatattttctctttattctgaaagtttggtgttttgattattatgtgttgaggggacttctttttgtggtccagtctgtttggtgttctgtaagcttcttgtactttcataggcatatccttctgtaggttggggaagttttcttctatgattttgttaaatatgttttctgtacctttgagctgtatttcttccccttcttctatacctattattcttaggttcaggctttttacgatttcctatatttcctggatattctgtgttagggatttgttggacttgagattttcctagatcgatgactgtatatcctctagagagtcttcaacaactgagattctgtcttccatctcttgaattctattggttatactcacatctttagttcctgatcgtttatccggcttttctatttccagcatcgcctcattctgtgttttctttattgtttctatttcagctttcatgccttgaactgtttcgagtgcttctttcacttgtttggttgttttttcttggctttctttagattctttaagagctttgtttactttttgaatttttggtttgtcttttcctccatctcatgtaatgttttgcttgtttttttcttctatttctttaagggatattcttgtttcccctttaaaggactctatcattttcttaagataattttttgaggcccatctcttcttcatcctctgtatagggcttttcagatcttgctggtgtggagtccctagattctggtggtgtcaatttggtttgtctgttgttgagtgtgttcttactctgtctttttcccatcccttcttccagtgagtgcaggtggggtctctctctctctctctggtggctggcagagggctcagcctctggtggcagcaggatggcagagggtggtgggtggacaagggtggggtttatctggactcaggatgggccttcccagtctgggcatgtccactcttgtctggggggtgggaggtgtttcaggcagaagtgagcaggggttgatgggggaggttggggaacagagcaacgccccagggcagatacttttataactgttttatttctaaaacatctgtattccccataaactgaattattcattttgaagaataggttactaatctgtgctctgttttaccatggggtgtagtattgaatcaactgcactaaaataaacacagtagtatttgctgtgaacaccacaggaagtagtaaaaaataccaatccaccattaacattatcataattgttattagcaaacatcatcaacatgttcttacctcttcaaacgttcctacttaattgtctattcccagcttccttgtgcatactcttcagtcctaattattaatattatgaaaactttcattaagtgtgtaggtctcattcttggtcctttatgaaggaatatctcccaaacttttcatttctgtcgtttggtagcaattccagcagtttgtacctgtcttccttctacatatcagttttccttgacctagttcagtggactacaagctgtttctaatgaccctaatatgaactatatattatatccagaagttctcaaatgtgcacaacctctgtatatgtgtccatagacacatttacaaatagagatacattcacagaagtactcttagacttctgtcatgaaggtcaggccttgggtttcccctctaagtctattatactttcttctattgtatcttatttcaatagaattaatgaatagatacatatctactacatgttttgactaaatgctcagaatggatagttggtctattttcaactgatgtcaatgccaaagtccattatcagaagattatatttacagactactgaaataaaattaaaatcttatttttttaaaaaaatctgaattttatttttaaacattattaatcatacttaaacacattttattttgcataagagacacatagtcaccactgtcagcttctacgttgttctaaaagtcattaaagcacatgttattgacatgaaggggatgcaaatgtttttactgatgaactgagataggtaaaacagcaaaatgtcttcagagaaattcctcatttttagcattctgtttatacactacttgttagttgtttattgaaataatccacagttgatactgtcctatatgatttaaaagtttaactaaagctgtgttcctctctctttctctcagcaccctctcccctacccacatgatcccaattaactcaggagatcttgtctccgagcttggagaaggaagcttacccatgaagctattggcaactggtagctactgggaaagttggttttctccaagtgtttagttcctagtaagttgactacttagtggaatatttcagatagcacaaattggcctcaatggttaaagtaaaagacatgaagttttatgggaagggaaagagggtggatttggaaagagtttgggagagtgaatatgaaaaagatggcagattcacaataagtcagacacatctcagctgtgcagttccttgtagaggagcaagggaattacatgctgcttgccaaagtaaattgtgttctactcactgggtgatattggggattttaccttcaagagcaggctactcaataagaaaacacacacacacacacacacacacacacacacacacacacacacacaaagatatatccaatcaatgtatgtgaaaatcaatccagaaatgccagaaatacaacttccaaattactgaacaaaaagatactgaagatgggtagcaatggcaaataaatatctcaaaagttttctgataaaaatggccagtctgaaagaaaacagaaacaaacaggtgaattcaatacagacacggaaaggaatgtcaaaaatatggtggaaaaagtcatcaagtgaaaaaaatcacagaaattgagatttttgaataaacaacagtaaaactggaaattgaaagcccaatgaatcaaattcaaatattgttggaagcagacactggacttcagtgaggagaggaaagaggacaatactgaagaatcactacattcaaatgtaaataaggaaaataaaaataaatgggtatggccagtgtccaaaaactcggggatacaatcaagagatgaaccctaagaaagtatgagacaaggaatctgagacaaacactaaaggcacagtggctccatttaatacaatgatgcatcaaatctacagaaagaaacatatttgagcaaaagaggctttcagaaccctaaatagatataaccagagacaacatttctccatgacaacttatataaaagatgtccaaagtacaaagcaaagaaatagaaaaaattgtaagaaaaacgccaactcatctacgaaaagcagaattatcagaataacaccaggtttcccatcagccattctcagtatcaggaaagtatggaatgttatttcaagccctgaaagtaaataaccatcaaacacaattgacttattaaggaaggctatcttgaaactgacagagaaataagagcattttgagacaagaatgaactacgacagttcatcaccaacaagccagaaccacaaaacgtactgaaaggaatattatatgtagaagaaaaggaaagtttcaatataagaagactacagaaaaaaagcagagaatagcttagtgaaggagagataggaaggaatccatcatgcccaccacatcagaccctcatatctctgatactaataatgaagaaagtaaagaacaaacaataatctcatcaaccagaaaataaccaacaaaactacagtaattaatagaaactaaaaattatataacttcaactcgtgaataaaaaaacacagaaagatgagtgcattaaaaaacaaactggatccaactggtataatcttctctgggaaagattatttctcctactcttagcatgcattagctgcctgtagccctttgcatagggttgaggtctcctaggctttccctgttcatgttaccatggcaattgttgctgtccttgtttaactcttgtttaggtagtataatatttctaaaaactataccccactgttaaagatacctaaagaatgagggtcaaaagatggaagactgaaaagaacagaaatttgattgtggacatgattccatagttaaagtgtttgctacatgatgatgaggacaagagatcaactcctgtccttgtttcatcttgttgctgtgataaaatatactgacaaatagcacaaagacaattttatctaggcaatatacatacaatttctaacatgaaagttgttattgtagaaaatactcagtaatcattttccatcttgtttgttacagtaagaactaagaggttcagaactggaatttaaaatcatggcactagtatgtgtgagatgtaaatgggaagatatcctgggggccaggcagagttagtaaccacaacatcccccaatgcaagcaaataaatgtgtgcctataattttgaagattatgatatgatttaggtccacaggaagcagcaaggctgctttcacctgggattccagatgttgaatcctaccctgcaataaatatcaggctgtggttggaatgtaaaatgaaatttaaaagaataagtaaattatttaaaaatcagaactcctagaccctttcaactgagataggtctgagatagggaaacttgaaacattctagccaataaaagtatcatacttttagcatcatacatcaaacagttcagaaagaaatagtctctgggacaagacttaggtagctgtttgtttccaggacacattctttcttcacacaaatagtcaaagtagcagtgtagaattttgcaccatgtcagaattacatctaagaaagcatcattaccatcttaggcacagagattaataataatttccagttaaagctagtaaaattagcacagaaaattctagcagaagtgtcaggtggaagggatgcctgctttctaaaatatacagaagcacccatgaaaccctgatagctcaatggtcactatttaagaagagccacccatttcctcaagacgatctgcctcttgcatgtccaacctaagctagagccctctcaaatatcttttattatggcctctactataaactccagccctcaaaactaaaaaattaatatctatacaaaaatgaaatatattcattaactaatgaaaagcaattcctataagttgatgatgttgagaatgctaccatttttatattatttggtgtaagagtagagatgatagtaaacagtgtggtcaagcttcataagcataatgtaagagttaatatatgtgggtttgaggaagtcaagagattaaattgagttaggaggaaaaattgctgctatgactattgtgtttggatgaagaagagctgagagggggtaagaggtagtgcaagaagtgaacactattctgtcatctagttttatgtgaatgggcaaaggacttctgcctatttggcaggagctacctaaatactccaaccctttaactttgtttcacaagaatatgacagtcattccaagataaaacgtctcctgcaatgacattcatggagcaggcctcataggatgttgtggaaaattatgggcaagatgtaggaagatctcacacatgaaaataaaccatcaccatcacaatcacaatcacaatcacaatgcctgggagttaaacactgcttcccagtgttctttccagagcaccttgacctccttgttctttgagctacacatcacagaattcatcaaagaaataaggacaatgtaggtcagagatgagtctgtctgactcctgggaactctaggacttaagcttgaggtagatgataaagatgaattggagatagataatgacaaccacaaagtgggaggcacaaatgacaaaggccttctttaccatcagctggagaaattgtaaggatggcaaaggtgaagaacacagaggagagggctatcattcctgtgaatagaccacaaacagacaaaaacatgtcatttttattgacagttgtgtctgcctaaccagcttgaacagaagtgtcacatcactgaagtagacagtagtaaagccatcacgggggcttgactaaaatgcagatgttacctttaatggccatgctcagactaactcccagtgacagatgtcagttaagactgaccctctgcactacaaaaatagaatattaaagagaggcctagacctggttcccaggtctctctctgacttgctgccttgccatgtgatcacttgttcctgcctacactcccccattaacacccttgagacacaatgcagtggtggtagggggggctgtcagtagaactgagctaattcagatatgtttgcttgaaaacttcatgatgtgagttgaattacttcctagtcacctcatatattttttctattataacgaaaagcttgctaacatagttcactatggttgtgcctcaaagaagaaatagaatttaaagagaagcagggggcatggtggtcaagagaatgaacttcgtagtcacatactcagggttaaatgctgtttcctccagatcctatctctgtaccatagacatgttacttagatttgctgtgtctcaatttctccatatttaatataggcttaattatagtcatcttcacagaaccaccaggattcaattactaaatgtatcaaagttcttagtaaattgcctggcacatagtaaatgctacacagtaagtcctaagtgtataaaatttgagacatccacctgcagggacagttaaggtaaagtgcttaaccccccaaatcgccaatgatcatttagaaagagaactaaaagataaaaatgagaggcaattgggacaataattgcataaatgttgcataaatataattttataacttacttaaagaggttggacagttaaccaccacattactatgtgacataggcaatcaaattcacaacagatctaaagtgaagagcaaccccaaatgagagttttactcactttcttttcagccatcaaatatttcttgttctcttattatgtgtcaagtctatggattcaatccctagtacactagtacacaaaagttgcccaatatttatcgggtgactatttaactagagaagtcttactgttaaatgcttcactgcagaactaacagggaagagtgtgtagaaatggtagtgtagagaaaggaatgttctgatagggttagtgcagaagaccatgaaagaataaaggaggagtagctagctcaagctgagcactggaaagcactctacaggagacatcatctaagacagtaaaagcgagggaatgatgtgtgcaccttggacacacaaaggtagagggaacagaacttacaagataccaaagtgaaagaatcattacagttcacaggttcaatgtggaaaatctgagcccagagagtgcatgattgatttttatttcacctcagacaaagtctgacctccctagaataaacttcaaacgtctataaaatggacattagtatttacttcagaaggatatttgagtctccaaataattgacatagtaacatatcaaaaatgttagccatgatcattagtgtctttgttaatgaggatcaggatctgtttggggaataaagcaaggttccaagtctagagcggcatgttccctagtagtcttaagagaccaagtccatgggatctgctttaaagcagagaagtccagttgtagaaagtgacttgctgtgtggaggctctcccaaaccaagcatgaaatttgactgaactgagtatgttatggtatactagccatctttgtgggttgtgaattgaaagagcctgtattcattttgttcaaactaggcataattatattgcaacaaatcacatcccttctcttctgccactacaagacatcatggcctttgcttatcaggctcttgcacacagcctttgccactgcatctgggcatttcctcagctgcctctaagtatcctccagccacggtgagaatctcattcacaatgcatgacacagtgcatgaaggtgacatgggaattccatgaagggttgtggttctctttttgcaagtctcttgtgaaacctatcaccttaaacatctcttgaccaacaaatacttagaaatagcttgttttggcttcagatttcaccttctttttctttaataagtcagagaacttagtgctttaagtaagtctgcgccctcttttctggtgcattgttttgcatccgaatgcatctggaaagttacctgcttcttccttcgggttgcaaagactcctatcacttatttccattaactgtatttttcaagcttcgaagaacctatacatttctatgaagataaacaaccatttatctttacatttagcatctatctataatttatccaagaacaaaagttcttcttgtttaatggctcaaatgttggagacagctttgcaattttttgaaagcacaaatacactatattttcttttatacagcaagaggttagatggcctctcactaaatacatatctttaaacacactataatcctttctcccaaatgtgatgctgaatgctttctttatattgtattacagagttcagtatttgcccccaccatatgccacaaacaatgaaccctcttccccatttggttttgttacacatattagagtttagtctgataattctgcttgggtttcctccatttctgcacatctttcaaacaaagcatcaaatgcctttgttctaaaagattatttcaaaaatgtttgtaccataaacagccttggaagatagagacgtatccctctctggagtacatggccagcaggcttacagcacaatatagctgacttcagctccaaaagccctaacttccacttttctaatacaattcaccacaacgcagatatactgcctacatttaaataaaatagtggagctttatattttccacagagattcacaagcaggagaaatgctaagtagaaaataagagggttaagaaaaattccttttcttcttactagtagatagttatagatgggggaggagagtggaatgggatcaaacggggagggaagggaagagggaggggctaaagaagagaatatggggagggttagctaaaaactacggctcatttgaggatcgtctgggaacctaatatagtagaagcttttttaaaatacatattatgtgaaagaaatcttaatcatgtatgaatccaccaaataacaggaaaggcacagctctaactagacatttctagccacaaatgaaacctccaggggtgggaatggttacatctaatcaagttgttgaccaaaggagtcccatggaaagcctaaacaacctaggctgcttccaaggctattgggtgtcctctgtaaactgtcttcagtcctgctgctgaaggcaacacctatgtaactcactagacacagagaagtagagctgttcctacttagagtcttcatacctactgaccactgtccataatactagaaggtactctgcatgctacctgactagaaaggtaaacaccaacccagttacctaccctttgatctacaatgatgacctacctgtaagatgtgctggtacaatagtggcagaagactacataggccattgacctaggtgaaaatcaaatcccactgttctgctcaaggaatttagctttaaaatgactcataatgacattctgatatactcaaatcagagtattgctcatctatcaagagaaatgcttcctcttgcagtagatggaaacatataaagagaataacagttggacaatgtgcagagagggagagagagggaacactgagtgctaaatgtgacatctgatgtgggatgcccttctgtatgctgtgaatatgttttattactattggttaataaagaagctgatttggccaatagccaggcagaatagagccaggtaggaaatccaagcaaagacacagggacaaaagaaagtcagagtcttgaagataccaggagctgaccgaaaagcaggatatgaagtaacaagccaagagccccaaagtaaaatatagaataataaaaatgggttaatttaagttgtaagttctagttaataataagcctgagctaataggcaagtttataattaatattaagcctctgagtgattattttgtaagcagtgggacaaaaagcttcaggctacagatgtctccatcaaatccctttcctcgggtctcagagaactctatggaagaaaaggaaggaaagactataagagccagtagggatggaagacatcaaacaaacaaggcctaaatacaacaagactgattcatgtatgaacttacagagatggtagcagtatacacaaggcctgcacaggtctaagccagatgagggtcccagggctgagaggggaaatggaccaatccctaatccagaagctgtcttcaattaatgataaccacttgcaaaggaaaagttagttgtttctaatgatatctccctagtgatacaatccattcttaagggcaaacctcatgcccaacagtagagagccaactcaaaacaaattagatggtggtttcagaggcttttgtctcataatgtgttgtctgggaatgttccttaccttacaggtcttttgcttgttttctgtatgtgcaaatttggaaacaaagtagttgatgtgaagactgacagaagagatgtgtccaacaactgtaagtcccagaacaaccaagacttgaggattgacttttgggtccaacaactgcatgtcccagaacaaccaagacttgaggactgacagaagagatgttgtgtccaacaactacatgtcccagaacaagcaactagaggaaacagaagaaacccatgaatttccagattaggtaattaacatacttggagaaaataagaaaagaagacacattcaaaggcattaccatgtgacactaaaaaacaactctagagatgaggatgaaaatgagaaatctgtcatagttaaaagactgagatttcaaatgaaatcgggctttttaagtaatcagacgagaaggtagaaaaacagagtccttcataatcatgagaagaaatcatgtctaagctaatccattcgcagtgaattaatacgccatgctgattttctcagaaatttattcaagggctgccatataaaaaataagagacccaggaaatagagaaactaatagagagaaaatggaattccagaatattaatgaagaacatctctaggattatggtgttgcagcagtaacaaacaagaccccaattcagatagagaaagggcatggaaggactccagaatggtcaccttaagacaaaaggaaattaaataaataggaatccaaaaaaataaattacataagacaattacctgacatatttaactatatttctatatgaaagaattcacagctccaatacaaagtttgaatgctaattaattacagataattgtaaattaaacaagtaaactaaaggttccatgaggaaaaattgcatgagatatgcccttatagtaagctgcatggcttagtttgaatagtatttgcatatcataataatgcatgatctgaaaatagacttaatttctactgagaggatggcaggaggggaagtatgtgggtgtgtttaggttcatgtgacagcagatgagattacaaatgagctgggaaatcaggagacaaagcctaacatttagaaatcaagagacatcaatatgtgcatcttatctgtgcttcggcgctattgtggaggcacagaaattaaaaggcaggtaaaagagtcaaaagtagttgtttctaggaaacaagaattaaaagtggaggcaagactaatttttaaataatgttgcaccatttcacattttcaatttctttatttggattatttatcaaaataaaattaaattgtaacaactaagtattactggaggaaaaatagaaacagtgggtgcatgattttctagacagaaagtggacactaataagaaattaatcaatcagaaaaggctttttttaggaaattgaaattagaaaacctcagtaaatggaaatagaaaatgtgatggcagggtatttcaacaatttatctaattctaataagtattagtggattaagctagcccactgaagtaaggaagctcacagagtggattttgataatctgacagtccattattttaaatatgttaaaataatatgccacagaaagtttcaaaataaaaaaattaaatagtattcaggaaaatgcagaaaaatgagagataatgccatatcatctgtagcaagcaagatattattcaaagaagaaatcactaagggacttataaaattgataaacaaagtaattcattggaacagattccattcatgactttaaaatgtcctaatggcgtaactttaaaatatattattcaagaaaatgagaaaactaccagggaaactggcaactggccaatcagcagaagacagcaacacatttctttctttcagaaactgaatgaccaacttgtcaaagggttcacaggacgttaaagggttgccttatttaaaatttttgaagaccccaaagttgccccatatattcccacaccacaatgcaataaaattggaaattagacagagaaaaagcacagacaagcccacccctataatacgtccacttggataaatttcatctaataaacacttctgtcacacttctgggtggtataggtcactctcagaaatctcaaatacacactctctcggtcattattgtaattgcttgaagtatgaactcttttccctcacagtttatatacaaggaaattaatacacaggaaaattgaataatttctccaaagttatatggatagtggcagaacagaacacaaacccagggatcctaaatccaagctctgagcttttgattcctctttcattccatttatttaggaataaagaatatgagtggaagtcagaggacaatctgtgagaaccagttgtctacttccaccttacaggtccaagagataagagtcaggtcttggtggctaacacttttacctgcggagtcatgtctctgaccctgagctcttgatttcttggtaggctttttctctcaccatagatgttaaagtaccctatatcaaaacacatcaaatgtttgcaaaatatatgcatttattgaagaataaaaagaaatttgtaaaacaataagaaatgaagagaaagtagaagccaaatgatgaaatgaaaattagctttaaaataaaataaatctagaataacaaaggtgtttttttttttggtttgggttttttgtttttgaagtttggatatttgaaaaaaatgagttttaatatgaaaacttaaacaattttgactaagaaaactcagaatggcaaaataaaaaaggtaggagaaatgggtacagagattgacatagataaacaatgtatttctaaaattatatcttgagtgacttaatatttatgaaattggaaaagtatatggaattacatattcaaaatgtatatactatataaacaatatttttatttatggagtatatacacataattgcatgttaggaaatatatttatatactttttagtatgtctataaccatagactaataaattcacatatttaagtacatatctatgtatagaaccataactagacaaacaatacatagaaaatgtactgtaattatccttccaatgggaatggtaatagtgaaaaaaagatatcaagttcaaaatgcagaaggttgtgaaatttccccaatacttaaaaaaagctgctaattacaaaccttggataccaaaaatagataaaacagggagatgtaattatcagccaataatgaatagaaaaaagtagcaaccatgtataaaagaacaactagggtctgtcttaaaaacatgaatgtacccacgttagaaaaaaataatttaattcatccgtaaccagttaaagaaaaagacatgtagttatatcaatggatgatgaaaaggaatgagctgaatttttttttaattcatttatgataaacttgtaaacaagccaggtaatatgaggcaatcccctttccctttcacaggacatctgtctgggatctgtaacaagcatcatagttaacagtgactaaatcataaaacacattgaaataaaaatctaggaaaagatcaaaatgtctctatgactcctagaagttagttttatattaaaccaaagtatcaaaataagcacaggatataaaagtcaggatgggaaaccaaactgccaagatatgaaggaagacaatttaattatgaatgtatcttcttccttttcagaaagtttcttttattccaggttttttcatcttatttcaaatgaatgtatagttggaatcacaattttaaatattcagtcattttccagttcattattttaatatcaaggtttccttctctttctcctgggtttacattcaattctctctcaaatatcaaaaacatacacattgagatagattgaccaggattactttgaaaatgggcattaaaaagtaagaccccaaatttgttgattgcttcaaggtctagctaagatccactgtccactttctcacttgtgtatggttcctccctgcaggatttcaaatggtcttgctgaggctacttgtaggctgttctcagtcagtgataaatacactgtgtattcttgtgctacatcataatgtctatgagcctgaatacttccaatttcttttgagtaaatgtttgaagaccttgaaagagattgtgtggaatgaactgaatgcctgactacagctccatgcctgctattctctcagtttaattggcttgtcaaagataccacaataaactatctcgtattcaaacattcatttctaggtataatggaatatagaaaataaagcctttttgaacatccaatagaaactagcaattctagagaagccaaatttatgaataactctgattaaatcctccttctgatcttccttaacaagaaggacctcagtcagtcccaggtgggacacagtgatgcccatgcattgcaaagctaacagaacaggcatttgcacaggtgcaatatcccaagtggatgccatgtttcacgtccccagcatatgagagatgatcaacaagtagttttcgaagggatcagtatatgattgtgttatacttagattgaaggactctcaaagacagatgttcagttattaggactgacagaccccaggatgtaaatgacttgtcaaacagaactccatccttaaaagtctttgggaactgagattctgtttataaaagtaattcagagacaagtgattctcttcatccccttagcatggcaagattatgtcctcattcaaaatccctgtgggaaagtcctcattgtgcatgtatgtgattgggttgagaacctttttgtgatgggatccccagtcaccatggtgttggatcttgctattgttgccttgaggatggtcattatgaatttgtacagaaggactccagaatcttagtgcgtaggggaatggttctttttgatagtttacaacccacaatttaagaaacagttactgtagccaggcatgctggcacatgtcttaattcacagcacttgggaagcagaggcaggcagatatctgtgagttcaaggctagcatagtttacaaagggagttccagaacagccagagctgctacacagaaaaaccctatctttaaatgcaaaacgaaacaaaacaaaaaggggaagggagaaaaaagaaatggtgctttatgcagctcaagagaacttactgctcgtgaaaatgatccaggacaaggcaacccacaaccatccataagtccagttccatgggacccaatggtctcttctggccttctacaggtactggacatgaatacagagcacacagcatacctgtaggcaaaacactcatacacataaaataaaaaaaatcttcgaggatgacaaagtggtgttgtgggaaggctcatgagtaccttgtgatgcttcctgtgtatttgttatttctacatctgactaaccgggagtagttcttccatgttacatattctttatgcagtgtgcctgctgcagcataatagagggactagatacaatgcttcaagcctttctcttctgaatcaagaaggagcccagtaaggtaaagtcttgttctataacatgaggaagcaagggtttatcttctgtagctaaatgtggtcttatggctctcatctcatggaatagtagtgcttcctgggaatattgacaagtagaaaagaaaatgagtgttcagttgtgccacaaaacttagaaatccaaaagcataaataatggagggaaattgcccagaaaagccacttgtcatagagaagatcagacaaatatctcaaagggtttaattggtcaatctcactgaaactattatctccatgatgtcaagttgagctagaccagagaaatagggacagccaattctgttccctctgtattctatcatactgttactacttggtacctgtaagtaagtagtggaaatctggttttggtcaaatgaattcaattttccctccttatcttggaaagggtgtttccaagaatctcttcctttcttaccacagattttaactatgggccagaagggcacgagtttatgattagctagttcatgtatcaatgctacatgagttcaggtcatcagtggaggtcgcacagtgagagatgctgcatacctatacacagggattccagaggaattctgtagggagacactgtaaccacgcctcctaagaagaggctacaggtgtgctggaccacgcctatcaggtgatgtcaggtgagagcatttaaaggaacagacaaggcacatggctccctctctcttgcctctctggcttgctgcttttggcatgctctggcttgctgttggctggtgtttatctattaaaagatatcctaaccttatggatttcatatcagttatttttctccatagaattccatcagggctttcggagcactgggactgcttactcacatcaatcaacatccagatatttctccagtccttgagatcatcatctttcctgcttgaatattgtatttctcttgatgcgatctccctgccatgtctccaggtgaacagcacaatttgaaaaggaagctgccacgcaagtgcagttttcacacttgaaacccagcttgggagagaggaagagttagaaaacaatctgaactgctcagttttgtgcgaaatattaaacagtgacataaaatgtttgtattttgagatatgtgtgaccacattgatatctgggtaccacttactgacatgtatcctaccagattctaacaaatgtcttatcagcatagtctcatggcctcttgacatccatcttatgtggatgagggatgcagtgtcttcaatgtattcataatagcctgaaactgaaaacaacctagatgtctctcaaccaaagaatggataaaaaaagatgtagtacatttacataatggagtattactgttaagaaaagtgacatcatgttaagaaaatgacatcatgaaatttgtggacaaatggatgcaactagaaaaaatataccgtgagtgaggtgacccagacccagaaagacagatagggtatgtattcacttataagtagatattaactgttgagtaaatgataatcaagctacagtccacagacccacagtggttaggtaaagaaagaagagagccctaggtggggacatggatttccctgggaaggtgaaataaaatagatttttttcaggtggactggaggtggatgaggctgagaatggaaggaatcatgtgggcagaatagaggaagagagtgtggggagacaccagtggaattggggaaacctaatgcagtggaaacttcctagaatctatgaggatggcccatctttggtagccaggcaaggtttacagtggtgggactgggttgtatttggttgagttgttagatgaggaggtcccacagtagagatccctaaacaaccaggctgatgctaggacagaaaatcattctctgaaaactgacagtagggctgcattgccaaggatgacatctacacatctcattgaacacacagaagtaaagccagtgctgcatgcagctttcacccctacattctattcgctttggcaggagaaggtactctggggaagaggggcagtggaagaggactgggaggagtggagggagggaaaactgtgtttaggatgtattgtacaagagaagaatgtattttatattcaaaaactaaaataaaataaaaacaagtgaagaaattgaggcctgaagagataaggaagtttccatggtcacatgggaaataaaggacttggggttgatttgattccagatcaccccattcctatcaccacacactttagaatctagaatgaatgtgaaatgtgaaactttccaattgatagatcagagaaattggcaacaatgattcatgacatcgtaaaagaaaggaagtatggggagtggagatctggacacacagaagtagatcccagagttatagggagtatgaatgggaaggatgagtggggaggaagcaaaaatttaatgtattgatttcctgttatgtactaagatgtgagcttggcaattcacatacagtaattcatataatctccatagcaacactaggagtagcgttcattcctctattttataggtaagcaaatgaagacaaatgaaacgagcaaagaaaatcggatgcctctccatttacactgcggttaaagccaaggatttctataaacttaaatattttgttgcttttatcactgttgcattatagttactaatatttcaaagtgtcacagcctttactgtgcttaattagggatgaggaaagtagaagctgaaatacagtccccacaggcaggagactgagaaattaaaacaagtgattactggaagccaagaaaggaagttaaagtgactaagaagctggctctgaactatggaatgttctgggttcacactgtattcaccccaacatgaaaatgtaacatcttgcttcactgacatattccagaccttagatattttgatttgaccagtaagaggaagtgttttgttcctagatttaccaaatggaaattcctttgggaacgagatggaactggcttcctgactcccagaagtgtacctcatatacttctgtccctggcctgaaccaattcgttctaggcatgcttcttcatggtgtgaccctgttatctgaccagtcgttgacaattcaaaccataaatttgggtggagatctatggccatataccctcagtgcctttactgatctacagatattcttagccaagctacgtgtggctttcagtactcattttccatctttctctttccccatgtctccatcatgcttctctcccattccaataccctgtgaacctcaagagatgttagagcacttggccaggttctgccaaccaatgctgtatcactcctgaggccctgctaataatcacggaccagcctgttgttatcaatatgccaactttagagctatgacagaatttacctttgaaggttttagtagaaccacagatttatttttttatggtctttcaggtcttatacccaccagctcctccaaaaaatgctattgtctgacagttatcagttttcaatctcaaccaccgtcaactttacacacatatatgcttcttcctggttgtactttccactttggagaactgttactccatgtccatcatcccccaaatgctcttccgtctttgtgaccaagaagaagcaatttcgattccaggctgtgccactcagctcttctgtctctcttttggtgttaatggctgctttctgctcacagccttggagtatgactaccaggtagctatcttaaacccacattcatagtcactcatcatgggcaaaagacatgaatgtagttggtgatggatcatggagtcagaacctggccttagcatgaaaatcaatgcactaaattggaagtctccattgtttatgtctgacacttaaaaagctgttctattactgaagacaccacatacattggacacaagacttggataagacctgatttgaaggcctcctccatgaaaactggcttttatagtaccagaaaatgctgtgcaagttgccaaaagaaggatacctatgaactataacaataatcagcatgacaaggtattccaaaaggtgtaatagtgacactcacattgtggtagtaatctcctgctctctaacagacttaagacccactcaacatgagggaaatcatgtctgatactggaagcctaaacaactacccgaggctggtgagatcatggatcttagaacagactctatagctaccactttactagatcagcaattcctaactacatacttaatattttcttaatatttatccttatacccacagataaatataactctcatctctcatcaaaggagcttccctctctttgcctcaagatagaatcaactatgggatataattctagggtataatcctctattggactgggtccagttaaatttcagctgagattgcattcttgctgaaccctttctgttactcctttctctgattctattatctgaaagaatcacctgcatttgggtccttgttttgggatctacttatagagaaactgatataagaaaggaggtgtggtaattttaatgtaattgggccccacaagctcataaggaatggcattattagaggtgtggctttgttggaggaagtgggactctggggggtgggctttgagttctcctattctcaagctactcccagtgccagagaccatttcctgttgcctccaagaaataagactctcagttacttctccagcaccatgtctgcctacataccaccatattcctccataatgataatggactgaacctctgaactgtaagacagccaccccaattaaatgttttcctattctagactcaatcaaatcacaaaggaagtctgaggaaggtagttgtagacttgccataggttgaaaggaaactatgctaatacatactgaaacacagagcaatggaagacttctgccaaactgcctaacctattcacctatcctctttcccacaattcctgtacaccatgacttctttctaagagccaatgattcttagtaagagctacctgaataaggtgacattgtatgtagagagtacagactctgggtccagagtaatacattcctcaaaggttagttcaccactatacacatgaatcataggaaagtcacttaagctccctgatctttattttctgtccttattgtggagctgataacatgtcaaccttccacctctcaaagttactgactaggctaattaactcaatggaataacatttcctggcacataggaagcagtagtattagtacctcctcacaatgatgacctgaccacattgttctgagtcactttgaggtcaacattaatcaccctgtgtggtcttaatgaagatccttatttttaacaatcaagtgattgagttctctctcccaaaaggtcttgacattacaaataagagtctcctataatccctgatctgtattccagtaaaaggtaactattttcctaggatcatccaagaattactgagtacaactgacccatgttaagaaatcactcaaccacctttctgatttctcttccagattaccgtttcttctaccatgctaatttactggcttatcaaatatatctcacagctcccatttctcttgcccttcagagtcagtatgaggaatctcagaatttttgtattcatcaattctcacatacagcctgaagaaacacatacaaaatcatgtacagctatttttaatgtaatgtttatttgaatgtaaaccatttattaagttcacaggtgttttttcagatttaagttttatacaattagataaaatagtgcaattatgattatccaactggaatcaagtcaaaggttcatgaaatagtttgaaactgggccaaagattcataaagtatttttaaaattgggccagcaagatagatctgtaagtaaaggcagttgctaccaagcctgactaccctgagttcaatccctaggactgacatggtagaaggaaagaaagaacaagttttcctctgccaagttttcctctgacctcaacattcaaactatggtgcatcccccccctctctctctctctctctgtgtgtgtgtgtgtgtgtgtgtgtgtgtgtgtgtgtgtgtgtgtgtgtgtttgtgtgtgtgtgtcactctctctcatacacacacaatacatatatgcaatttttaggaatttaaaaacattttgaaataggtaacatccttgttggccaaggagccccatagaaacctctgaacaacccaggctattttgaagctattggttgctctccccaaactagtgttaagtccccattgataaagacaacacctacataattcactgaacatattgaggtcaaactggtgcctacctagagccttcatcctctacccaatagtgtccatgttactagaaagtactctgcagtttacaggaggagaaaggtaaacaccaactcatctacaaatccttccatatacaatgtggtcaggtcatcattgtgaggaggtgctaatactactacttcctatgtgccaggaaatgttattccattgagttaattagcctagtcagtaactttgagaggtggaaggttgacatgttatcatgtcatggtaacctggctgcacaatactctgatacaatagtggcagaaaagttgtgggactaactaaccactgtcttgttggaattaaggtcaactccatgagatagaaccaatacccagcacggcttgagcagcaaagaatctgagactagataggtcatgaaccttgggggaaaacaaatgctattgttctactaaaggaatgtaacttttaaatgactcctaatgacattctgctatactcatagatcctaaatgtgacatgtccatcaaatctctctcctcagagctcatggaaaattgaagaaaaagaggcagaaagattgtaagagtcagtggtgatggaagacaccaaggaaacaaggccttttatacacaagactgacacatatatgaacccacagaggctgtggcaacatgcacagggccagcacagttagttctaaggtagatgaggtcccagggctgaaagaggaagtaggcacaagcccccatccctaactcagaagataactcctatagacaaccccttacaaaggaaagactcatttttttccaacagatcctcactggggatacaaacaatacttgagggctgcctctatgcccagcaatcaatgaccaacagaaagtcaatgatatttttggagggtttttgtctcacaatgttttgtctgtgtatttttccttacagaatttttgcttgtttattggataaaagttttggatattgtttctatgggtttcctgtgtgtgcaaatgtgtctatgcatctatatgtatttttgtgatttttctttgactcctttttaaaaatctgtttacttgtttggtcctactctcatttgtttattttttccatcttattttatttttaatgcctgtttgttttctttttaaatgaatttatttattcttattttatgtacattggtacttttcatgtatgcctgtgtgagggtgtcagatcccctggaactgtcattatagaccgttgtgaactgccttgtgggtactaggaattgaattcaaggcctgttgaagagtagccagtgctattaactgatgagccatctcttcaaccccttcctgtttgttttctaaagagacagagaaagaaagggttttgatttgggtgggtagggaagtagggaatgtctgggaggagttagaagaagatacattgtttccagatattgtatgaaagaaatattttctatttaaaaacatttttaaaacaaaagaaaacttgggagctagacccagtagataacactctcaccgcctgaaggccagatgctataatcaaagtcctgggaggcacagacagctggacccctggagctcattgactttggcagtccagcataatcagagggttcataatcagtgacagaccctgccccaagtaacaagaatcattgaaaaagacactaatgtgccagcctcttgcttccacagttacatgcatacatgtgcacaggtacccacaggtacacagatgtacatacttatctgaacatgggtaggtgcttggatatcacctctcaaagtgactggaatatggtaggaaaagatgcaggagtagacatcctgcaagaacctcaagggaatctgttttgtgttctacttcaggccctggactgacccagtgacctgtgaaaagcataatgatgaggtctagacttgaaatcctcaactaaattggatgtcatgactgacctccaagaacgattagaacctagttccaaaataaaacaatatacggaactggagttgttcacagcagcttcattccccttctttgcaaactgtttgcagagccatcctgtatatactcattcctttctcacccaaatcccaacatgtttactcttggtagcacctgggcttttcatacagcttttaactgtaacttgaattaacaccactgacttcaccagatcctttggaggattaactgagacagaaatctgtaaacatatctgtcaaatattagttgagactgaaactaaacatctctcctttccatcaggcaccacatttttatagcatcagccttgttcctcattttcaaaatcttactaattatcccaggacaacctgcaacttgatccccttgcctgttgagatcccagagctactgatcatatctaatgataggcaattaatatgtaaatcatttctatctgaaagaatgaactcgaaaaagtttattaaatgattgcctttcctcttccgctgcctactgcacattgattcaggcacaagccctattgatttccctcactcacatgaatcccttcactgtgactatccccaacctgtagataaatcccaattatctctgttagatcggaagccaagctggtttctctgcctcttctctcctgcctcaaatccatcaaatcacaatgatgccaggtcagtctttgccagggatgtctttttccagcaaggaagcaagatagacaagggagagggtaaggtggctagcagtttaaaaaataaagtcatttccttaagagacaagttgctaagtctgtgacctgggaggataagttaagaccacttaagaggtccttctcagtgataaaaatctaaatgctgtcaaactttcctcacccagcttcagtttaccgacctccatctaatcaagccatgtctcattcttgtctcactcaagatgatgttcactttggtttattgtcatctctcactgcaaactaaattataaactctgaaaattataaagtctgaataccgtctccttcatgagtgtagttccagagacttgccaaggcctggcatacgataagtgcctgaagaatgaatgaaaacacatcaactctgtgtgttacaataataaagtgttaagaaacctatagaaaatcttcagcaggtatcaaatttgcaactgagtagtagacacttcccagatagagaagggaagaaaaagctgtatagaaaggagagtgctgctctggccctggacacctggggaagggcccaggaccagcacaggaagatttggtggactttgcagagcccccattgagggctctaccctgcctggggagtggtgggtggatggagtctggggtgggctggggtggggaggagggatgggggtgaggggagggagagggagaagggacttacatgtgaaaaaagtttgttccctaactggaactaataaataaatttaaaaaaaaaagaaaggagagtgctgctcttggcctggacacatgggggagggcctaggcccggcccaggatgtgatggactttgaggagccccatcgatggccctaccctgcctggggagtggaggagtgatagggtggggggcaggtggagggttggggggagggttggggggaggagggagaaggaattgacatgtgaagcaggcttgttcctaatttgaactaaaaaaattaattacaaaaaataataaaattaaaaaaaaaagaaagaaaggggagtgctgaaaagcttgccactgtctcctagccaccaagagtctaaagattgttcatttctaaccctcagtgccatggacaaacatagggagaacggaatgtctgtacaaccagggatatctttacatgcatgagtgcatacctacatgcatacatacatgcatgtatgtgcgtgcgtgtgtgtgcacgtacacgagcgctattgggaattgaatacagagcaacctaggcagctcatatctgaccacttttattccaaaataaattccagatttttattctgcatagaatctatgtgtgaaagtaacagagcctaagctttctaagatctatgataatatggctccaagcttgagctgtctaaaccagttttctacactgctttctgcttgaagcaaaactttcccaagacttcttaacactaatctgagggttgggcaaataagacctacacacagtgaggtcttcaggtacctgctgctgtctccactcagctctaaaggcattctcaggctgtctttggggagatggcccagaagctcctcaggctaatcactgtaggacatattctctggctttcagggccctaatatgtagaggctgacaggtgtacccaggttataaacccaaatacagtcctacaagaatgtgtctcctctgcctcctgggtctcagccctgacacatccctcttaggcgcttgttctttcctgcacctgtactgggactcacagagcccaccattccaatctctcccccttggcttcttccaggaacatcctgctattcctggtaagagctctttaggtaaagggggaataaaaattgttaccctgagatgagattcttcataaagataggctccttctcctaatcttctttgaagagttacacaatttcaggggtagggagtcaccaaattctcataactattcttccttaagacaaacagacttcagccagatcaaatacaacaccattagtctctggtaagaatttcttgacactctgaagaagtccccttgtctggtactgcctggtttttgttcagaggctcacagagataaataccatatattttagtatcagattattttctctattgggaaagattctctactgcagcttcagtctcttttagcattcttagtacaaatgattaacagctggtcatcaacttctgttaaatggatttttataaacttgaagaaagtctgcatgctttcatcactggtatgatttactttatgtaaaaagtcactttctgaatatgcataagcaaatcagaatataatttaaataccctacaggagcttactgtttaaagagacaaaaactgtgaaatattacataaattggacttatcctcaaccttcagcaaaatgatgtatcctcatggcaactctgctttttatattcagagtctgcctttccttgggtgagggatacttgagttgctgcatctttcctggtgcaattgtttacctctgcagagtaagtagatggctgtcctcaacatccgattggctgtaaatttgtcttctagtttagggaaggtaaaaatgtagaatggtttacaacatatgtgaatcagtcctgggaactgtcagcagacttccatcattctgacagcagaggggaggggttggtggtttgttaagctttgccttttacttttaggaaaacaagacagacccaactctagctttactgtataaatgacataaaagaatggtgattcatggtcctgaaagtcaaggcctctccagtccatccctaaacaaatggtttccaagcatctaatgtatatagcttggaactagtaatatctgagatgtatctgagtttttgtgtaaggagaagcaaagaaaatggagatataaaataatgcaaataacccagagaacatgaggatagtataactgttgtagagaactgatcatttgtactggtctctgtgtatgaagaagagtagcagggcagaagaaacatttagcagctgtatagtcagatgaagcagactagatgagtttggggcacacaggctgctacaactacaggccctaaagttaagtaaaccaacagggtattaactacaacatgtgtcccaagattcatagctagtaactaaattcaacagttttggactaaactgaaacaatattactattatttgtgtacatttctgatttgataaccactcaatgaagaggcagaacaaccttcatcactagagttactttccaagggcttaccagtggtctgagcaccagatcacccttttgcttttgttcattaaactctgcatcataaatctagcaggcagtgtcatcatcatagccatcatttgagtaggtggccatttttacatacccctgaatttcttcctaaattccatgtgttctttacacaactgcaggcattaaagcaagaacatgacacatggaatgaaaaatgatccactgtgttgactccactacatgaggtctaagcaaaagaagaccagaagggtaagtagggtcagattgagcaggattaatgtaccataataaggttgaccatcttcaacctttggacagtgggaattgcctacaatctggattatgaagcttttctgtagattcatgacactgtctgaaatacataggaaactatgttacagaaatagagaatctgaaattatcattagaaataggagagagaaggtaacttgggtctggagggaatattcagaagcttatacacttaaatcaaagcctaatctaccaattggtggggtggtagggggacagggagtattgttgagatttgctatgaaatgcagatgagtgctcagaggagaagagcttgatgtcatattagagggatggagatacctcagaccttggaactttctaggacatactgatcacttgagtgaagggtggcgtcaataaaccagaaaagttttcaaaggaaaacacaaagacctgaagggcacatgtctctgcacccagatgacagcacaacccagtcctcttcaagattaacagaaacaatgacaaagaaatcaagctatgtctaatgttatctgagaacacaaaaggttgctgaaataaccgagagggttttgtttgttaactaggaaataaaagtacaaaagcattacaggcaaagattttgacagccacacattaaaccttcatggaatttttacctcataccatacactatgttagatatgaaaatgctgaaatggaccctgcattgtaccctgataatggttgttccctgagaggcagaactcaccatgcagcaacgtgacagagaaatcgacagagaatgcttaacatttaatgacaaatttgcaagccttgggatattttttcctgatctatataaagcaaaatctcatcaaggagaatggaccttcatgctagagttcagtgaaataaatgcctgtttcctggacaataaggcattcttgctctgtgtgaggggctgtctcccagggctgagggctatgcagctcctgagtcactcagaacatttgtcaccatggactcttaaggcatttatcactcaggtgttacagaaaccttgtttgaacagaatagcttagcagttggatattacagaatcaaatgtctttaacaccccttcttgcccaagcaaggatcttatctatttttttctcactttcaaacaattccagtctctcacataatgtctggctcaaacaatgaatgagtaactctttccttccatgggattattttgatcgctaatcgtgtttaggttcactttgtgaaagtaaacatctttccacaatgtggtcccttgcccaagatacattcccaaccatcatctcactgatttctcaaaacaatgtagagggaaaacagaaacaagggtttccattataggcaaatcaagacaggaagagtgaagatagaacctgagcttataccagctgtacctgtcattttttctgtttgcttggagtacatcaacacccgaaggtgactcacagtgccaatagtaaaacattggagaatcaatctaagaaatattaaaatttccaaggtctcgaactttctagataaaacaaactctcatctggagtaattttcaaggtatggataatactagagaggaaccctggggctctggctttagcccatggaaccacaaaaagactatctccactgggcaagctgtaaatacccatttgcacagaacctgctgaagttttaggagcatgagtgtattcaccttctctcatatgaaagctactcatacagaaatttttaaagctctataagcaaacctggatcttgcattgatttaagaattcaacagacaatggactcgtgttaggtctagtactgggtactgagaacatagtgataaactatgttcattgcctgttctggggacagggagagaagtagatttttattttgctaattttagcagactagtgagtgctgaactaaagttttgtgccagtaatagggatatagaaggtagattttgtttcatttcatgatttttaagttatgaataatggaaaacaaatccatgttctcagtcagacatcccatctcttcccccattcatataatcaatacttattagcagcacagagaccatgaaatggatatttgtgtctttatggcagtctgttattcctctgtagaaaataatctgcaactccatttgtgagattctatttctgcaagatccatgtgaacctttagatagcatgagtttctctgtcactctctgcctggccagctgagtccaggaaatatgaagtaactttatattctccctgatgaactccatctccctgctctacagaccagagacatacatctctgagacacgtgtaagcctaagggaagcccattcttttgctgtaaggcattaataataatccaaaaacccctgaattaggatgatggttaatgagtatcttcaagacttaaaagtaggcagtcaagaaaaaccaagaaatggcatctaataagtgagaaggccatggcttgagtctcacctactgaccccaaatctccattcttcatgtggtgactgcaatgcatcaatgataaattgggctcctaatcaaagcctactgtgcgttcccaggaatcacatgaagagcagatttggcaacataaagacaggcttaggaaggatggaaaatagagaaagaacagttctttctttctttctttctttctttctttctttctttctttctttctttggtttttcgagatagtgtttctctgtgtagctttgcagcttatcctggcactcactctggagaccaggctggcctcaaactcacagagatccacctgcctctgcctcccgagtgctgggattaaaggcatgcaccaccaacgcccagcgatcatttctttctttagtgattagactgcattccttacccaactagaaggcagaaaatagtttctagagatctcagtaaagattttcacagatcctcctggtaagtccatgatagactagcctctcagaaaagtcagagctttcttcctccagacattcaccatctccaatttcccatttttcttttaagttccaggaccctggcatcaacatctcctctttctgggcctgtaaattatcttcctgtagctctgacagtgcctgggtacttaatggagcacacaagcagcttcgaaacagttacagtacatttttatttgatccttaccgcaggcctacaatgttggcagacacatcatctgcactacatctgtgaggctaggaagcagttggtggcctcctataagaaatccaagtcaaatgttgatgactgtcagagatcctatttaaatacagttacttgtcccaaatccactctcatgcacagcctttcttcaggaaacccatatcacttactgcatgcaaatcagtttgatctccagactatctccttcctgacaatatcaggcttgtgggtatgttttgtgctttccctggagatgacagagaggcatgcctgacccaggtcctattgctccatgattgccaataagaaaagatttctctagatgggtgctcatttgtgttataccactccaaatatatttccatctcccacctctctttccatctcccactaagttacctgtaaatattttttttcttcttctatggacccttctattctggaggctatatggttgtctttgatcttcagaggaattcaccacaaaggaaacatttgtggaaatgctggccaggcacatttgtatggtcaatggcttgtgtttagaaatctttctgaacagcctgtaaagggatacttgtcactgtcactgcaaactcccaggagtctatctgctggggtgaggatgctaagtccttcactgctgactcactccagaaagtttctccctatgatcttgatcaacctatagatactgatctagtttaagacattaggaaacatcccccctaccaaattgtatgcttgcaggtctttcttagacctttgacaacttaaaagtcaagattctctacttttgtctctgtgttccctaatattcctattcaaaagagttggaggagttgagtgggcgaagtttaactctacggcccagagatgggaggtggggaaagaaatgcctttaaggtgaaattgaaatacacaatgtggccggtgttgtgtcgcacacctttaatcccagcactcaggagacagaggcaggtggatctctgtgagttccaagcgagcctggtctccataatgagttccaggacaggctccaaagcaatacagagaaaccctgtcttgaaaaaacaaaaacaaacaaacaaaagaaatatacaatttggtaggggggaaagaatatttattttctttttctgatctgtttctctacccttcctcttgttttataatttcctgattacatcacagaaggactgagtcatgagactgtctcatattgaataatcattgctaaattatttatttctaatcaaacaggaataaataaatgccacagccagtattcattctatacatatcctttaaatcattggaacatataaatagggggccttaagcttaagaagttgtcattccacccctataataagaaagaaaaaggcagacgatcagtaaacaaaattttctttgtctcatcatagaagtgaagttgcaggccaaattctgacctgaacatttggtgagacactttatccagagagatacagctgatcttacccagagccacagacactgcagccataagtaggaatagttaactgtaatgttgatgaattgctgcaggcagagcacagaccaacttgaaagtgagaaaaccctgggggttatgatgtagcaggagctgacacacatttttgaggtttgcatacagaaaccccacaagattctcttgataaagattcaggaaccatctttattctggcaggagaaagaattaatcattttgaaatatagccagctggttcttcagagcaaaggcctgcattttatttcacagagagcaatactgccagagccttatctcagctcagagaaggaaacttctcctctgcccagtcacctgaatccttcccatctccacaaagctggaaggataggcagcaagggtcaggactccagataaactaatgaggaattttcaggcatgagagaaattagattactagaagaaaataattctacttctggagaaacacatatgacagtcacagacccaaaacatggagcaacccaaaataatcaaacaggaagataatagaacatctttcacccaattcatctcccccctctctctctccctctttctctctctctctctctctctctctctctctctctctctctctctctctctctctctctctctctctctctctgtgtgtgtgtgtgtgtattcatgtctatacatttttgtctgtgtatgtgcatacactctgtgcacaaacatttggaggccaggtgttgatgtcaagtgtctttctcagttactccccattttttttgttttgagacagtaggtctcttactgaacctgaagctgaatgatttaagtagattggctggccaggaggcaccagggattcacctgtctctaccttgacagcactggaattacagatgtgcactgctgcctctgatgtttcgtgtgatttctggagattcaaactcatcttcatgctcacccagcaagcactttactaatgagccatctctttcaagtatatcttgtactttgaccttgatcattcatctttacctcacctgtcaccctttcctaatgtccttctttgttccaggtagcccctcttctatcattccagctataatggaaacagcgcgacactttgccttctgtgtatggcttatttcacttaacatgatgatttcaagttccaccattttcctgaaaatagcataatttcagaacaacaccatgctggcacaaacagacatgtagagaaatggaatcaaataggaggcccagaagataaactcactgctactaccacatgacttttgacaaatatgccaaaaacacaactgacggccctcttagcaaatgaggctaagaaactagatatgcacatgcagaagaatgaaactagactcttatacctccatattattattctacatatatacacacacacatatatatatgtgtattcatagatgtaattcaaaatggatcagagatcttctttgtttctttgttttttttcaatataatatttttattgattatttaggagtttcacataatgcaccctcatcacatttaccacccagtctccctaggtccacttcctttcccttgtgaactacccaaagaaaagaagaatgaaaaaaatatactaagtctgatttgtgttgcccacatactcactggagcatggtcaaacttccagtggctagccccttaaagaaaattgagttcttctccacctgcacctctgccagaagcttcaactgtgaagagctacatttcaggatccctatcacaatttttaggagttctcttcaatggcttcctatctagactgatttgggtgttgtcacaagagccttctctatgactctcattctcaactttgagtccgcaggcatcaataacactgaaaaggaagcacccttacccattacattcaccagcagcatggagcatggatttccacatgctttctggtggcagtacagaccatagacatcagtggatccctttccctcagcaaggacatcagacacaatcatagctcttggcagcagtgcaggccactgacgccaatatgacttcagacagtagcacagaccatggagatccatatgatcctcaacagcagcaggggcaacagacctcaatatggtctctggcagcagaacagacatgggcatcaacatggcctttggtagtaacatggaccatgaatatcaacatggcttcaagtggtagacagaccacaaacatccacacagggcagcagtaccatgagcaccaatgtggcctcaggcaatagtacaagccacatacatcaacatggcccccagcagaatcaggaaccatggacatccacatggcctttggtgtcaactcgggccacagacaccttaatataagacctgaaactttgaaagtgttagaaggaaacagagaaaccactataaagatacatgcacaggcaaggacttaagaagaaaattctcattagctcagaaaataatagcaagaattgacaaatgaaattaatatattcagctgagtgaagagacagcctacagaatggaagggaactttttgccaagtatacatccaacagggcattaataagtgggatgtatgacgatctccctccattctttatgtgtctgcaggttcacagatcatcactgcagatctcagcagagagggccacaggatacagatactatgaggaggacggggaaaatgacaggaaaactgggcagcatgaagcctctgtcagtttctagccaagagaacctcaatccttacatcaaagtcctatttccaccactccatgtcacctgaaacaaaacgtgtggctgttgaccaaaaatcacaaggcatggtgaaaataaagcaaatattaaaagaaaaagaacaaaagatcatcagatcatcagactggatccagttatatcagataccagcattacctgcctggtcattctagtcaccatggaaactaaaactatgtttcaaaggatctaaaagaatgaattgatgacatatcaaaagtcacgggcaatctgagagtcggaaagcctaagaaaggaaaaaatgaagaaattctagaaatgaaaggtaacaaaatggaaaatgacttccatggattaattgtcagacccaacacagacaaggagggagccactgagctgtcaagtttgtcaataggaacatcccaaactgaaatataagaagaaaacaaatacataagaactaagggacacagaccaaacaaaaggaatagacaagcaagagaatggaaataatggacatcaagctaccaatcttgggctcttgcagaactccaagaagtgaaagtgtcaccatcacaaaagcaaaaacaaacagttggaaatcctgtgacttcagaatggtgctcagaacaaacaaccaagaggaaatctttaatgaagccatagggaggaaattgccttcctgatggagaacaaaggaagcattaacactgacttcttgtcagataccacataagagggaaggggagagatagagcaaagcatgtggagatatttgaagttcttaaagaaaaatctacccacatagaattctgtaaagagcaaagttattcttcaaatgtgaaaaggaaatactttctcagacaaaaacaaagtcaaacaaataaacaaaatccctaaaggaattcattgccaatagacctgccatttgagaaatgttaacgtagtttattattcatgaagagggaaataacataggtcagaaatctgtgtaaacaaaaagaaaaacataaaatagggaaggaagacatggacataaatgaaaatctcttttttcttttcttatgtataatcaacctaaaatataactgtttgttcaaaacaataaaagtaccatggctaggttagtgaaagaatgacagcagtatcaaaaggaataaaaaggaaggactgttctaaaatctataaacacgtgaagcagcatggtttgtctcgaacatggactgaaattaatttaaaatgcacatggtaaattctatggtaacaagattgttaatgaaaattggcatgctaaggaaattgaaacattttcagtgtataaaacactcacctccacaaaacacaaaatgagtaaaatctaattaatagaaaacaattataaatattatatctaacccaaacacatcgtagttaaaaggcatattgatggtatgggttaaaaaaatagtactgatcatgggcatggtggcacacttctttaatcctagaattcaggaggctgaggcagggagatctctgtaagtccaaggctatcctggtctacatagcaaacatcaggctagccaaagctatgtggtgagaccttgtttaaaaagaaaaacaggaaccacaggttctatctaaaaagaaatctattcagacagattagacataatgaaatggaaaaagatgtaccatgataacactagttcaaaagaagttactccaaccatttagattacagataagctgtattcagaaccagaaagacatagaagataaagtagactattatataatgatgaggtatgaatatgcaattctgcattgagaaaaaacatgttatttctgtaagaaaatgtaaaagtccatgtatttaatcaaaaaagcatcaaaacagatgaagcaaaaactgaactgaaaagacagagacacatggatcagagtggagccctgtaataccctctgtcagtaattcagatatttaatagacaaaatgtcagtaggaatggagaggaagtgaacagagctatccatcactttacctaattgacatttacagactaatccacccaacaatggtgaaataaacatccttctcaagtccagctgaaattcatcaagatgagagcattctgagccacaagccacacattagaaaatgcaagaaactagaaactacatatatattctcagatcattgtgaaattaaatcagaattcagtaaaggaggatgactaaaaaattctaaaccattttggaagttctcaataatccatgggttaaagaagtctggggggaaaagggttgttttgcgacaaggtctcgctatttatcccaagttgtcttcaaattctgtctttcagcccagcgtacccacatgctggagttacagtggtacatcgccacaccagccaaggacattttttaaaaattattctgaactgatgaccatggagatacaatttatcagaagtagggggacacaggagaaagtggtacatgaaataaaacagagagccttcaatttataatatagaaagaagaaatatctgccatcaataacccaatccttgtcttaggaaatatgagcaaattaagctttaattaaacagaagaaagagaaatattagagtataaatcaacaaaattacaataagaaaaaacaataatgaaaatcaacaaagcctaaggctgattctctgagaagatctataaaattgataaacaactgggcagcctcactgtgaagaagaaaataaagaaggaaattagcaattccttgaatgaaagggtcaaactactgacactttcatgaccgtgatagactgtgatgggatttccatgcctagaaatttggtaacttagctgcaacaggtggattccttggaagattcaaaatacctcaactcattacctgaaaaagaaacttcagccaggcctaaaggctctaatcgcagcactcaggaagcagggagaggagaacctgaagtcccaggccaacctgggccacccagttacaacccacttaaaaaaaaaaaaaaagaaagaaagaaagaaaaaaaaagaaaaatctgaggattgtagcatggtcctgcattataagcatttggagggagaaggcaggaagatcaggagttcaagatcagcctctgcctcatagactgaagggcagcatgggctgtatgagaccttctcacagtaaacaaataaaaagagagacgaagaaaagaaaactcatgctcgtataaactgatgcaggagaatcccttaactaaccaccatcattcacaatttttcaccaagttagaatagaaagaactatctcaactttatttttaaaaaatttaacacaattgcctggcatcatatttaatgttgagaaacaggtcgtttaccttccatgatcacgagcaaggaagccgcatgcttctgaaatgcccttatggtgaagtaaggcaaggggaaaagcacggatacgggcaagctgtagctttgttcctgattgaaatgactttatttaacacacctgcaaggaatttctaaaaccagcaagcaaggatggtgatggcacagaatatgggggcaaaacacaaagccagatcagctggcttactaacaataagaaggtagaagttaaattttaaaaaatgtaaaaaaataccaaaataataaaatggaaattcaaaatgtttagcatgaattcttttatagaaaacactgatacacaggttgcattaacactgatatttgcatcagcctaggatacttaatgataacatgtattgaaacaataaataaataaatctttatggctataaaaatcagtctatggaactgagaagaaatcctagttgattaaacagaatgaccggtgttctctgcctcttggtttaaagacttattattaagaaatcaaagcaaattgcatagtaattaagtgtttggttattcaatactgactacttggcaagaaaaatattttttatgagaagacttatgacttctatttagtttaattctaaatgtctgtaaatcaaaagacacttcttaaagccttggtacatctcaaatagggctaagggtgctgaaagacctacaaacagcaaattattgacaacaagattgtataaagaatttataaaacccacagaaacagctgacttgaacaagggaaaactcttggtccccagactgatagctgggaaaccagcatgggactgatccagaccccctgaatgtgggtgtcagtgaggaaaccttggaaatctacggggccccttgtagtggatcagtacttatcagtagcataggaatggactttgggagcccatcccacatggagggatactccctgagcctagactcaagggggttggcctaggccttatccccaaaggatatgacagactttgaagactccctatggaaggcttcacccttcctagggagcagaaagggtatggcattagttaggggagcaggggaggagaggagggagagggacctgggattgatatgtaaaataattttctttctaataaaaaaagaaattacccacttgaaaaaatttttaaatgtatcataaaagaaaatttatcacagtagaaatatgaaaggccaagagacagttcagaaataaattctcagaaaaatagctagctaattaaaaatacaatgaagtcaggcaggttaggttaggtggcacatgcctttaatccaagcactggggatgcagaggcaggcgatctctgtaagttcccgagaccagtctggtttacaagagctagttccaggacaggctccacagccacagagaaaccctgtctaaaaaaaaaaatacaatgaagtctattcatatccacaaaagctataaaaattaaaagtctaacaatattgaacaaagtatagtgatttaaaaacccctcatgtcgatcaaacaggagcattgtcaaagaacatgagatcagtaaattcattgccttttaagttttaaaatggttttgcaaactagtgatgattcatagaattaataaatattttaacaaaataagtatgacattttcataaatcctgcttcacaatgctacgcatgaatattttctgtatatatcaaacagtaggacaaagaaataagtaaaaacttcaaccttttactttaaaagcagtatactgagttttttagtgaatatagccaaagtagtctacactattatagaaactatctttctaatatttaagctgtctgctaatttatcaactgtgagagactcaaaaatatgtcacatgtttttatattttacattttaaattagtaatattttgtctaaagttaaatatccctttgggatttttctctaaattattagttatttgtatcaaccaattcaggtaaaataaaacaaaggaattcttgctttttctcaacatttggaaaaaataagtctttgatgttgttagaatagttttaaccttatgactaattattagtttaattcaaggttttatttttttataaaattgcacattgttgaccttgcttttttttctaagaaaactttatatggaaatatgaagttgtaaaatagtgcagctcacacctttcttagagttagagttttgttgacataaccagagcttcatatgcccttgcaagaaatattgcagagaatatagaggaatcccatggaagcttcaccagagagagagagagagagagagagagagagagagagagagagagagagagagacatatagaaaactattgtgtggtatctcaaccagagtattgacatttattttgataaacaatttaaagacatacctattaccacaaggatcctttgtgttcaacatttgaaaccatacccactttcctaccatccatactcttaaccaatgacaaatattggcttcttcccactttgtacaattaccttgtttctaggttgttacacaaacaatcaaagttcaacatccttccttgggtttatctgtcatatgaatatactcttcattgaagggtttacctagcttaccaaacctaattctaatttgaatttttcatttttaaattttagaaccccgacacatacataatttttaggtatatcttctaacatagtcaccactgaccgcgataccagtctcctgagaatcctttatacagtttagatgctggtcctcaggtctctggtatgcatttcctcgaagcttagactgttttttttttatcctgttaacggattttccataaagtcgagtcttcattttgctaaaatccaatttatcatcttccctttgtgaatcatatttcactacccattcaaagaattctttctagaattagaccctaaatattttctctcatttttgtcttaaaagtttgtagctgtgtgtcttgtatttgcctcgatgtctcattatgattctcattttttatttaagaaatgagacttacattgaactcttttttttgccaacaaatctctagtatcccaggactagttgttaaagtggattgtcatttttttgcactgagtagcttcttagattttgccaaaaagaaatgggacacagacatggacacacgaacacacacacacacacacacacacacacacacacacatacacacacacacagagagagagagagagagagagttctccattatgttcttctttttcttttccaagatcctttcttcaaatcacttatttttaactctgtttccatctatgttgcatccatacagtgaagattttccagttctggactgcccatctggatctgctacttaccttccccctttttcctgaccctcttgttcctctgtgcatgtaaagcatgctcacaactgctcctgaaccccagggctttaaaccctctgctggccaattctcacatgtatgccttcttgtaattggactccattctggctttcactgcccactttgaaagcatggtggttctgaatcaagcacatcaagtttcattgaaacagggtattttgtgttatgctgtgagatttgtagtcaggtttaagtgttctgggttaggctgcttttctttctgatacctcaaatcatgggagatgcctccttggttcatgtagtctcccacatatagaaggtttagtcggttccctggagtctccacagttgtgggtcaagagttcatgagtttccacgagtttggttcagctgtctctgtagagttcttcaacatgatcctgacctcccttgctcatatattccttgccccctctccttgactggatccccagagcttgacttggtgcttggttgtggatctctgcatcttgttccatcgaatattggatgaaggctctaagatgatagttggggtattcaccaatctgattagaggggtaagccagtacagctatcctctctgctattgctaggagttttagttggggtcatccttgtggattcctggtcgaggggagaaagatggagtggaacagcaataaaagagatatcttaatagagagaaccactatggggtcagcaagaaatttggtgctaggaactcacttcttatgctcagtttaagaatagagatatgcatgaaatctgctgaatatctcaatcatttgttcattttagatatccaatggcattccttctatgaatgaaactctttcatttgtttttttaatccatgaaagagatatgcattgtctttatttgggagcagttataaaaagagctgctataagcaatctgtcagagtttctgtagacatcagtttcaatccatttggttaaatagcaaggaatgagcatacatttcatttcataggaagctaccaactgttttccagattggatacaccatttttccatgaaaataaattaattctagtttctctgcaccagttgttatagcaatttatttttaagttgagatggggttcctttgtatagccttggctgtcctggaactagttctgtagaccaggatggcctcgaatttacagagctggaattaaaggagtgtgccactaccacccaacttccttccttttttggcttctctgatatatatgtagttttctacagaagcttaactcaatctttctctaaggcataataacattggaaggcttttcatgtgttaatttgccatccttgtgtttctgaggcagaacatatattcaaatattttatcatcttcaacttgactgtctatttttgaatattgagaatcattgtattttgtatacaagtctattgtcaaatatataatttgaaaatatcttttctagtctaatggtagcttttattctctttataattgttttcacaaaacaaaagtttcaattctgatgaagtgtcaatttcccctttctggttgtgcttttgttgttatttctaaaaacttttcaattccagtttaggaagattttatggtaaacaatatatagattacgatttaatatcaattttagatgcactttgttttcaacatatagatatctacttgtcaaagaatccttgctgaaacattatctccttcccaactaaattgtctatgcagcttcatcaaaaccaaccatgcatatctgtgtataatgggatgatcctacttaggaatattctgtcccttctaagattgccttccctttgtacctttgtattgactaatgttggtcccctagaatttatctttctcttattcacttatttctaggaattttagcaacaataatttcattcataggttctgttgtcttcagtcttcttgaaagtgggatggaatatccctgaggctagttactctccactacacaggagcagagatgtatgtgtttattctgactgagccctcaggatgcctagttatcctgcagccatcttctagacattacaattgggaggagaaaacaagctgtttctccaactctcctctttaacctttatcccctataagatccttccctgaagttttctcacataaatggctcttgtggtcctttgaccctaacaaatctgagggtaaggaagtacaggagccttactccgagaattcatactgcacttggagtacaattccatctttaaaaatgtcaacagccatgagagactgcaattctagggtattgattgaaaattccaaaataatccatttatttcatattacaatctattttgggtgacttaatgaaaccttgagccagtctcagttatccagccttacacttgagtcccctgtttgtccagtgttcccatgccttggatacattattcacttggttgttatctccattttcatatcgattgtgggcacactacagtcttaatgcttaaataacttttagttattccatatatgtctcgaacacacacaaaaacttttatgctgcaaattcagatatggaacagagacaccataggagtttcaattaagtaaagagatggaagttcctaagtgagaaaggaaaaatatgcaagctgaagttgctaagatctgcaataagaaggagtcttttaactgtgaaattgtgaaaaaggaaagaaattcatgcctgcataattattgcacctcagagcgaaaacttgcagtcacagaaaaatcacagatgcatagttgttatggaaaagacatcaactcatgtggcatgtgtgtgtgtgtgtgtgtgtgtgtgtgtgtgtgtgtgtgtgtgtgtgtgtgtgtctgtgtgtctgtgtgtgtgtgtactcaagtgcatatactttctcctgtgtggtgcataggcacacatgtataaatgagtgagtgagtgtaaaaaaaaataataattgaatggagtttgggaatccatgagacttgagatgcagagctaccccttggaataagacggggctccagtaaattttattttaaaagttaaatcaaagctacttgcatcaaaaatggcatagaaggaagcagcagaaatgattgatcactcattctcagcacaagatgattcatatagctatgaaataagagtaggctgcattgtgaacttgagtttgggatgattcagacttcaagtggaaatactcaacagaaagttagaaacatgggagagacaacatagaggaaacattgagactgggtgatctctgagagagaaaagcaaaggactaaggactgaaacaggaaattactaagtagcactcaagtgtgtggctgaagagcatgaaggaagtatgtcaaagtaaataggaaagagctcattgaaagaagccaagagctttcttctactccaagtattaaattaatttaatgtagcaaaggttatgttaattgctacactttgtttgcagttgttcttgtattttctctgctcacagcatctattggcctcgtgttaccctatcttctgaataaagaagaaatttttttctattctctggggtctgagaaagacaaacaatgaagttttacactagaaaatttagcataaaataaaacatacaggaagggattcataaattattaaaatctatatggactttactaagtatgtttatatgatttttttcttctactactattgagttggcatagaaaggtcacaatttgttaacatacccaaagatttttttaacagtactacagatttcataacatatttaacatatgcaaaatattctttcatgggtgtatctatatttacttagtcaatcacagatttttttaatatatgaattgccagctgaatatttttatataaaaatagtcatagaatattgtacctcccagtttttaagagaatccattattattcaattgtgtatgaaacttatttactgttaacctcaacgtcttttgggcacataaactcttcctgcaaagttcttaccacgtacaaaaatggtccaacaactctgcttctgggtaatgaacacaaatctgtggttaatccttctcctttggtgcattcgtcccaaatctctcttctaataactccgttctttattttttttttcctcttgaagcatcccaattacattcagtcattttttttactatgaagttcactgggtttggtttttactggtagaccacgtagccaggagagaagagcaagtgtcattatgagatccaggtatttggatcaatgagctgtttgcgtggggtgttagttacatcgaggcttttctgatgttttcccttaggatgtactacttctaataaaatgtgcactcatgaacagggatatgcagactacaaagcagacagtcataattatatggtaaaaatgtattgattaataattataacatctctttaaacgaggcatttttaagaaaataaataaaggtgtttattttctgcaaatattgtggtttacaaaggaaggtgtggattttctctacaaatatctatctctctctgcttcttgtcctgtgctttaccagacttcagtttttgcctcccttgtcattcagtctctaaattctggtactgctcttcagttggggcctgctgtgaatcaatgggcatgaggcatggggctgatctactacaaaggcctatgctacaagtgagtcactcagtcttacaggtttaaaacagacctgactgacactaggcagctccctagtcagtagttaatctcatgcaggtagacatactaaaataccgactacggctccaagactaattagtacattagctaaaattccggaagaaatgagaaagaatcattcggtgggataagaaaaactggcataattttaggatttaattttaaagttgttttgaaatcacaaaacaaaggcatgaggaagaaatggcaaatgcaagaacagaagccacagttctaatacatccactgtaatctagccacagtgatgtcaccagcaggggatggagacatggtatcaagtccttttttaccagatgacttatgctaacatcatttccattattgtgaatgtttctattttttgttttgtgaactgatctcattgtttatcctaggtgggcttagaaatcattatgtatgctagggtgaccctgaactcatgaaaaccttcctgcctcagtctcctgaatcctaggattgcatgtgtgagctactataccaggctccatccgaatatttgcatgacctttgtcctgtgcatttccctggactaagttttgacatatttttcataaagctatataccacaggctaaaaccttcagtcaacttcacaagcaataagatgcctgacatggttctcccctctgccaccaacctcttatcctgtcactttcatgactcagaccctccagccacaatcccttccttctgggtttcaataattagaaacttaaccccagctttggcttttcaacttcccacactgtcttgtcaaacttgcttccacccccagattggacaatggtaatctgtaaaccaaatctgatctctcactcccagctggctttgtacatcgggttttatggtacatcatcacccaattcctttgtatactgtcactagccctttcacactacagttgcagggctgaatggtacagattgagaagttttgaatatttactatctggacttccataggaggaaaaagttgttatatccaaataagtgcccccagatcagagactagctgcttctgccggttatcataagacaatctcatcacagctgtacaatgaaaggagatgctttctgtcaccacacagtatgaagtatttcattttacacagaacattgtatcaccctacattgatgtcccttatttaccatttgcttgtttatctgactcttatatgtgcgttgaggttcataacattcagtgtaacacttcagaattagtgacaaaatacctcttgagaaatactttttgtaaatgattccagtaattgaatacatggattttgctgctcaaaaactcatgatgtccccattacattatgattcttccactagcaactgcaaagaacaaccaacattgaaatagaacagcaataagaattagtcttgctcagttcttcagatctcttttatatacagttataatgactattttcatgctttctagtgtttctgtacccaagatacttggcttaaagctactattgtgttacagttggtgtcctgggctggagaagatggctcattggtttaaaaaaaaaaacactggaccactgctcttccagaggacctaggttcaattcccagcacccaaatggccgttcacaaaggtctacaattcaagttctagaggattcaacccttttttacttccttggacaccagtcaagcacaaattgcatataagtacaagtagaaaaaataatcaaacacataaactaaattgtttaaagagagagagagtttgtgtcctcccaaattttacaggttgggacattatacccaatctgataatattaagaagtaggctctatggaagatgactgcataatgagaaatccactctgatgaatgagatgttcataaaaatagtttaataagctctcttgccccctcagtcatataaggacacagaatcttctttgagattaaaccctcatcaaacaccctatagttttcagactgtgaacaatgaatttcacaggctcaggtattttattatagcatcttaagtggactaaggcaaaatattacagacaagataattgcccatgatcatgatgaagccgggtacaaagacagtgaagttgtggtaacatggagaaaagagcatcacatcctgaagtctacttgaagcctcatatcaaccagaataaaaaaaaatacaacacaatcaacaacatttgctatgaaagttgacaacacaaaacaatattccttcatatatatatatatatatatatatatatatatatatatatatcagatgggtagacagatgaaagagacagattgttgtggaatatttgcttacactgtaaagatgtatctctgcataaggtaccttctgattggtttaataaagagctaatggcccaatagctaggtaggagagaataagtggaacttccagggagagaaaggactgtgggaggaagagaggcagagacaccagcaagatgcagaacaaattggacatacggtacatacatacatacattaatagaaacacattaatttaagttttaagagctagttggggaaaaacctaagctaaggccaaccttttataattagcaagtctctatgtccttatttgtgtgctggtggccctaatacaagaaatatttcattttaaatttgcaatgaatcttgcttaagacctgaatgcatatgcattgaataggaactcattccttcccccaaaacattgcttaaccatctcaaattgcctaagcataaggtaaacaaaggtatcaataatagacatgtcaaagttgaaagagaaaagcccagaaagcctcaaccctacacaaaggactgcaagcaactaagaaatgctgagaaaaatactcttcagagatgaccaactggctgtccaacagcaccctgaggatgtgcgtgcaagcagcattgttcagactgagtgagttatgcttgggtatacatgtgtatatgcatatacatatatgcatgtcacaacaattaaaggctattaatttgaaagagaacaagcgggtatctaggaaggtttggagagaagaaagttcaggcgaaaatgatacatgataactgcaaaaataacagaaggaaaacaggtgaattttgtttataataagaatatccaatgcttgtgtccctgtgagccagattttatcttatcaattataattttgtctgatgcaccacaggaaaaaacctggttccttagcagccatttgaacattagtaacttcaaatcacaccaaaatcttatatatgacttgtatggagaaaaaaatccataaagtgtgactctcactgagagaagcccatactcatgcttgtaggtgtcttatttttctccctggatgcctaccctcgtgcttaagcctattcaagtcctgtgtgtgtgtgtgtgtgtgtgtgtgtgtgtgtgtgtgtgtgtgtgtgtgtgtgtgtctgtatgtgtgtgtgtgcaaatgtacatttctatgcattctgagaccagaggacatagggtgtcctgctctatcactctacaccttattcttttgagcctgggtttcttgctgagcctggagcctaggctggcaaccaggaagcccacagtgatcctcttatctctacaaagttccctcccatctctagacttcagacatttgtgcagccatgtcagctttttttctttattacaatactgctggctaattgactaggatttcttttatgctagctcagtcttaattatcataaatgtatatattttataagacttatcttaccaaggaccccttctgctggtcctcttcctgggatcacatggcggctctgtagaaaggagagccggaggaagagaaagagatagagcatgacttcctgcttgtccttgcttaaattctgaatctgcctgctatgtcacttcctgcctggatcaccagacttctcagaattctcctaaactcctagtctcacgtatcttgctccccctattgactaacagtgatttattcaacaaccaataagataaacatatacacagaaggacctccccatcatctcctcttttctttctaaataaaaagaagggtaacttatcttttataataactgaaaaaattatagctataactatctgtcttcaactccatcaaagaccacagaaggataatatataaactctagaattgacagagacatcctgctacctggagagtcacccaaagttcctctgtaccgttggggcatccatcttcagcctataggccatagtgtgtctagcacacttctccatttcagcaggaacccttcaggactgttcatcttgttttgtaagttcagcagtcactttttgtgggtcctgcatgtccactttatagagcaacaaacagtccaggcaagagcagtttcttgtccaaatggctaatcttgccatgttgaaggcaaactccataatgagtttcttcgatgcccatccccctttctgacataattgacgtgctaggaatagttgtgtctcactgtcaagaaaagccctaaaccatttcaatatcatatattctgttggtctttgaagggtttgaaaatatctatccatctcaaatgcatctctgtatagctagaaaacctaactaacctaattaaaagtttcatttaaatggagttggttataaatggtaatgattacagtcaatctccttttaaaagaaaaaaaaggaataggatatggagatgaataatttacattggtatggattttcatttattgatacaaccttaaggtcaattttgtgatatgtaaatttctcctcttgttcaggtattgtgtttatacagatcttttaaaatgtaatgcataattaaatatagattatatagtcacctatagtagccatgccagctttttacatgagtgatgagaggtctgacctcaggtccttgtgcatagatagcaagcattcctctccaatgagccatttccatggctcatacaatacatttattaaactccaactctactactgactgctactgtgttagttacctctttctattgttgtgataaagcaccatggacaaaacaacttatagaagcaaaaggttgtttgctcttacagttccagcaggtcaagttcatggtggcagagggggaacatgaaaacacatcttgaacagaaagcacaagcagggtcattaaacttgaaatgacccatgtctttgaaacctcaaagcctgacactaatggcatactccaccagcaaggccacaccttctaaacctatgcaaacagtgccgccaactagggaccaagtatacaaacatctgatcctactggggaaattctcatctgagatagtttctgtgctgaagccacaagttgcaatttggctagtgtcaatgttcctaactctccgggctgctgaagtcgatatgtagacctttgcctcctgcctctgtcccccacaatgctgacactgacaatcttcctcttttatattttatttatcttaagttttatttcataatcctttcttttgctatctaagtaaagaactggtagtaagttgggtcagcccatccctgagaaagtgcatcccaaaagcctattggtttcctttagatcatcattaaaaaataagatacgtaaagcccttggtaagcctaattgctaacaatagctcttagttatccctaaatatgtaatgtactattaagtaagtcttgcttggggtcagactggctctaattagttcagacatccgcaatttatagagctgtgaactaggaagtaggattagatcatcccaataataagaaaccctgtgctttacaatgactttcaggtagcaagcatatggagtgtaagaggctgagatcacattgatggaattagtgctgcttgtattttgtgaaaaattcttaatattttgagccttagtttactgtttaaaaataatggtgcccttctcttctgtagctaggaattacagtgcactaattgcatgtaaagcacttagagctgtaccttgctaatagatggaaaacacttagaatgtgctgtagtttcgatatatttatggaagtaagacactattacattgttatatttttatgaagctattatgctaggaaatgggacatactagagataaatttcagagaactgggagggcagaggaaagctgataacatgagccaacaaatgagctcatgcacccaaaattagcatggatttccaacatgaactatggcctatcaaaaaaaaaaacttgttctcagggggactattatcaaggatctattattaaggagctctgcgtagtaggatagagaagaaaaatatgagtggccctattcctttgagctgataaacagcttttgatacttgaactcacaatgaaatctgccttcttagaaataagattttgaaaggaaggtgtaagttgcaggtaggccacatcagtcaaaacttgataacaaggtggctatctcatgttaagaagacttagagcatggtaaacctttaccattttttttatatttaccaaatttcatagtactgaaaacctttactttccaaacatatccaatttattctgtgtaatgaaatgaataaaatcatattcacccaaattcctctcagggagactttgtatttattcaaaaggaattactttctttggagtatgagaccctaaggaaatgctcaagtaacacaatatagcaattaaattgttctgcctaatgaagggataaaggattttaacaagagagtaacttagaaagggaaaaagggggccaagtgaggcaggaagatactgggggattggaagggagaagcaggaaggacatggagaagctcttggcttagtaacagagaggtgtaagaaaacattaaaatgtctaattgtagttcacatgcttgctctgagcctgcagaaggaagccctttgtctctcgtccctaagagattggaggatgtatttgtgttgctcacttgtattgattattttgaagaccagatgagatgctgagttgtgtgttcaggtggatccaaggataaaagagactattgcagacactcataactcagagagcagagcaaaaaagctatccaagtcagagagccatatttctttagaacttctcataatgtttttaatgaagctttaaaagtgtctcatctgtactataatgtagaaaattaagaccagagagataagaaaatccacagcgcaatagaagtgctcacaagggggagacagaaacttagaaggtagcacttaggaaatagttctgcagccttctcaacaccattccccctccagaaacatagtttaaagcttattcattagtgaatgctatcctttttaaaaattgatgatactgttattcaaaagaaatataatgaaaatcacatatgtaaccattcacatggtaacagaattttcaatatgtggacataaggaagtaaaatttaattttaataatgtattttatttaagccaatatttctaaagtatcatttcatcatgtaattagaatattattatcaatgagaaactttaatttcttaaactacctttagaatcccatgctacttttacatttgtagcatgctcaattccaactgacctcattttaacttctctatcccaccatgctacaaagtatgtatcgaaggggtcaacctttaagcagtgattacccaaaaaagcaaaagtggttttcaattgtacaaagtgactacgaatccatgtttataatattagttttatgtttacatttgtaaatttggtactcttggataatggagagtttaaggaggaataccaaagagctgctgagcactaactacaagtggctatagaaatctatgtccacaaatcatcagacacttactcatttttaaaacacctttctttaatttgatgaaggatcactactgaaatggaacatatggagttgtgcccaatatccacttcattcttccagtttgtctttctgaagggtagagactggaaaaccaaaatctgttatttctgtctctgtctctgtctctgtctctgtctctctctctctctctgtgtgtgtgtgtgtgtctatctgtctgtctctctctgtctctgtgtgtgtgtctctctctgtctctctgtctatctctctgtctgtctctctgtctctccgtctgtctctccatctgtctctctgtctgtctgtctgtctctctctctgtctctctctctctctctctctctctctctctctctctctctctctctctctctctccttctgtactgtctatggatccagatgtagaaatttcaactcctctcaagcactaggtctagctgcaggtcaccctgacccctctggttattcaataatgggtctcaagtaagtatggcactgttcatcaaggtaactaaataaaatctggctgtaagttattatatgggactttttccataaaatggaatggccaacaattctttcccataaaacaaaattatattagactttgcattatatgctgacagcatcttatcatatctgaggagggaagccagaccctccttgcagcaaaatgctctgctggtaaaatcaaacactatacaattcagaagcagccttctagatggagtattgaaatggccttctaaaaatatattgaagaataaactcagaatcaatcctttctcagaacacgatgcttctcttccagaatgcagtgtgggtgctgggttggggacttctatatagtgctttgtccacagtaggaaaaatcatggtttgagaacaggagtgtaaacagtagtagccccactcatcatctttttcagtcgcccctgggatgtatttgtgcttactgtctggtgattctggactgtgtatcattggataccccgatccccaaaaggtacacacaaggcagaccgtacattgaaggtgggattgagttgcaagctagactgccacttgcatgttttggcatacttatgtctatgggcccaggagtgagaataagatctatcctgttgatcaggctgataagcattgatttgtaggaagccatgaaacaatatgtgtgatacctagtgttctatttagccttgtttcatccattccctttcatagttaaactaacagttgtgtacttctttaacttttatatccatcttatgttctgctccttgaaggactcaagtaaaacacgtgaaaattaattatttatttttcatatgttttatggtaaaagatcataagcaaacacattaaaacattatttctaatgtaataacacaggacaggggaataatgagtgatatgtgtgtcattatttatagcttgggttggtaaatcttcttaaggagagcatcaatatgagcatattcagacataacaacaatatatgagctgtgcaaaccaatgcttgaagagattaaggaagttaacttttaaaaatcttttttatagtgatttttaaattaaattagaaacaatcttgttttacatgtgaatcccagttccctcttcctcccttcctcccctgccctccactaacccccctatcccatcccctttctgctcctcaggaagggtgaggcctttcataggggatcttaaaagtctgtcatatcatttggagcagggcctaggcccttgcccatgtgtctaggctgagagagtatctctctatgtggaatggactcccaaagtccattcgtatgctagggataaatactgatccaccaccagaagccccatagattgcccaggcctcctaactgacaacgacgttcaggaggtctggatcagtcctatgctgatttcccagctatcattctgggggccaagagttcccccttgttcaggtcagctgtttctgtgggtttctccagtctggtcttgacccctttgctcatcattcctccctctctgcaactggaaaggaagctaacttttatctcctttcacaatcgccaccgtggctgctccacaccaccaacattgactctgtttactctgtttaataacaatagatatgtcaaccttgataggggaaagaccacaaaattcaaccaagaaatgctgagagtggtagaaatacttatcctcagggaatagtataccaagtggttatccaatgccaaatggtcagtattgaaaacatacatacaagtaacattgtacacacagagcaggttgtatttaggaatatatatgaaaatgaatacatgtatgtaacaacaattaattaaatagacaccatggattttaaagagagcaagaagaagtatatggcagggtttggagaggggaaatgatataattatattacaatctcaaaattagaagaagtaattaaaaagaataatgacctggtgtcctacttaacaggaatagcaagacatcagattgtttgataggaaaaattctttcaaatccctttccttaattttattgcctgagaccctctctttggaagaggagtctgctctcgtggccaacactaatctttccatttgtaactgaagacaagcagagtagtggtgttctcaactgccatgagaaaaattatgcatttctgcctccagggaacactgccattttcaaagtatgaatcagaaattgctgatgcttcataaaataagacagatgaatctcagtgccatattgccaaaggccatgctcagtagagtgttccttaatttatcatttagtgagtacctgcttgtatgtcttgtgttagcagtaataatagaaagatagccaggaccccaaatttccagccagctgtctcttgctatggattcttaatggggagtttaatacgtagacaatgctctgaaaaattgtatacagttgtccccaaatatagtacagtgttttacttcaatgaccaaggttggctcacatgtgttgcctaaaatgtccttcatattgtccaatggggtatagatttaaagacttatgtcaatctctttgacattttaccatgtccactccaggaatatgaccaaatggagtatttgtttgtcaaaatagtaaaaagaagcccagaaagatgttcataagcacagaatttgtatttttctcaggcccagagtgtattgatccaaggagatcactccaggatttttcctctaattggtggccttcctggttttgatgacctcttccctggtagagggagctctgaagccaagccagaagaagtggtactactagtgccctagccttggaaatatgagagaaaacagcaacaattctgatgaccgtcctcaagaagcatagtaagatgtatccacttctctgtctcttcttcttgtgttttccacactaaaactcagaacttccctagaaattgactaactccttttattttcttcttaaactgataattcttactgctacacatttatcctgattttcatgacctattcaaaaataacatatagtaaataattgagaaattatcacatttaaatatagtgttttctatgtccaaaaactctggcaatgctcttacacagtgtaaacactgaatagttgtctccccacatatgccccactcatggcttgccactttgatttcttctttatgcacactacttcatgcctatttcagaaattatgatttcctgtcactgcagatattatttttaaaaaactttaggagtcacatcaatgcgccttaaaaaaatcattctccacttcacaattggatgaattatcctctttctcctatcaagagcaagtctgccacttgttcaaaacttaaattttgtactgtaaactttaaaatagtgctttcaagtgcataataacacacaatttgaaatatattcttaggcataatgtctgcaatgatcatcaagtaatagaaaaaaaatcgtgaagtaaatcagtagctaccaattccattctccagaagagaagtgtaatgcgtatttttgtgaatctgacatattccaacctttgtgttcactgcacttccctttaatccatctaccttgttgatgtctcaaagctgctttttgtgtattgtggcttctctggtcagagttggttgactaaggaaaatggatctgatctcagtgggatcactctggttccctcattaagaactacagaaactgagacagaaataaagatcttggaggagctaaaatacaggagcataaggtgagaaataaaaggtcataaatggtaactgaaaaatgcaaagatgctatccatatagagaaaacagtaacaatttgagacctttgacagaaaaaaattacctgtctggatgggacagggaagaattacatagatttgggggcggggattaccacaatttttgagagtcttaagcttctcaactccatgatgtaatttcttcctagaatggtctgaattcttgtccttgagcttcatggaaaaatagtataagttacaatgatttttcccttttccttgagctaagcctaattggtttctatatttgcaaccaacatgaaaaataagactcaaagtgattaaacttatccaagatcacattttctgatagtgaaaactgaaaaattaaaaccatagcccaggtcccctaacttatattatgatggattatggcatcccaggaatgtctgatcagatacaggcagtgaggacccagaggtttatgtaccaaaattggaaaagagaagatatctctctagttaaatagccaagatgactccaataggtttaatgataaacactcagcagtatagcctcacagaagtatgggatttgggggggggttgttattttttgcaaaggagttttgaaatgtaattggtacctcaattaagctcaattaagatgagtcttacatccaatggcaagaatttttacaagaaggggacatgaggaaaacatgctgagaagtccacatgaaaagaagatcaatatatctacaaaccaacctgcagccacgactgccagcagcagacagctaactatctagattttggaattatggccaccagaacagtggaagaatccatttctgctgctcaaaatcatcaatttgtgctgatggattataacattcataggaaactaatactatattaaaatataagttattatgaagggaatgaaaatatcagagaaagataacagtacttggggttgctactatacacataggaaaaactaagcattaagaaatcatgtaggccgggcgttggtggcgcccgcctttaatcccagcactcgggaggcagaggcaggcaaatctctgtgagttcgaggccagcctggtctccacagcgagtgccaggataagctccaaagctacacagagaaaccctgtctcgaaaaaaaaaaaaaaaaaaaaaaaaaaaaaaaaaaaaaaaaaaagaagaagtcatgtagtatttacttagcatcaactgaagttcaagagagacgtaccaactgaggaggcagaaaccagggccaggtattggccctaagaagccaatggttttaaatcaggactggctgagctgtttctaacccaggtgctgaaaagtaattcatattcttcagaatactattctgaatcatttgctgaagatttaccaggaatttgtttctttttcctgtcatggcttcgtcaggaaagatacaaaacatcttctccgccattccgtcatcagcctgaacagtatccttcatgtacctccacaggtctgttataaaggaagcagcgtggactctttctcaggaacatctttgcttaaagcagggaggcccaaagtgacttctgcaaatgttgctattttatgaaaacctctaatggaaagttcggagacacaggattcaaggagacaagtgggtgacacagctctaggctctttaatctcctgacaaagaaccaggagaggataaagcagattgataggaaccctcatcacagaggttcccaacctcacagtacttcataaacaaaataagcttaaaaatatatgaatacccatgtagaaaaaaaattgtggaaaaaaggaccagtttagactgtgctggaattagaatctgtgaaagcatcctttatttatagttggataagtagaccatgagaacatgagctttttctacttactttttttccactacaaaagaacctgtaccattttcagactaactaaattaacagttagttggttccattgctatttcaatgaaaattcagttttctgtatgtatagcttatgaataaggtgaacaatatatcttcattgttatttgatgtcaacatcttgagatgagtgagtaatacaagtatttgaagaaagaatgccccagaggaacacataataaaaagccaaggaaaagcctgtgaagatctcaggatgctattgctcctccttaccaaaaagaagcagagcatctatacattcaaatgtcctggtcccttactgttttgtgcttttaactggccatactataaaagttctccaaactcaaggacatatgttcaacaatgttcatagcagcattgtttgtaatagccagaatagcctggaagcaaccttaatgcccctcaacagaagaatggatagagaaaatgctgtacatttacacaatggagtactactcagcagaaaaaaaaagcaagggaatcttgaaatttacagacaaaccgatggaactagaagaaaccatcatgagtgaggtaacccagtcacaaataagacaaacatggtatgtactcactcatatgtggattttatacatagagcaaaggattactagcctacaatccacaccaccagaggaactaggagacaaggaggaccccaagagaagaatgcatggtcccccggagaaggggtaagagacaggatatcctgagctaattgggagtgtggggtaggggagagggatctgggaaaagagaggtggagaaatagaggggagaagggaaatgggggaggaggaaggttgagtcaggggaagaatagaggagaattatgatgaaagatatcataatagagggagccattataggttgaggagagatctgacactcgggagatttccagaggtctacaaggttgacaatctaagcaatagtggagaggctaccttaaatgctcttcccgaataatgaaattggtgactaccttatataccatcctagagctttcatccagtggctgatagaagcagaggcagacacccacagctaaacactgaactgaactctgaaacccagttgcagagagggaggagtgatgagcaaagaggtcaagactggtctggtgaaacccacagaaacagctgacctgaacaagggggagctcatggatccaagactgatagctgggataccagcatgggactgatccagacccctgaacatggatgtcagtgaggaggcctctgcactctctggagcctctggtagtagatcagtatttatccctggtgtatgaatggattttgggggcccatcccacaaggaggaatgttctctcagactggacacatgagggagggcctaggctctgcccagattatattacagactttggggatccccatgaagggccttaccctacctgtggagcaaaggggagatggggagggggctggtgggggagcagaggaggggagggagagggagctgggattgacatgtgaagtaggcttgtttctaatttgaactaataaattttaaaataattttttttaaaaaagttctccaaactctactcatcaaaggtctccacagaacaagcacagaagtggaacaacctcaggtcgttcccaagagctaggcatgaaacagttcatttctgtcaagaacttatctgcccacattttcatggggtgcataagcccagtaccccaaaagaaaccaataggggagagatatctgatcctttgatgagtgagaaatcgattaaagaaattaatttgatttagagaaatataacttcttctgttcctatagatgagcaaatcatttcaaaatttagtattatttgtggagaaccaatgttttaaatgttttaaagggatcttatgataccaaagatatcagaataatttcagaaaagttgaataatatctaataaagacatatcttcaatcttttgtagtcatttttcattgtctgtaataggaaataaaacaagtacaattcagaatgattcatccatagcttcaaaatagtgatctattattcatatataaattctttgttcatgtttagatcttctaaaagaacacttagaataagccctttaaaactccaccagtgttaaagccattgtgatagaatgagcagtctcctttgtaactatgaccactcctaacttctcccagacattctctccacaccagcagctcaccagagtagctcttgtctctgtatgctacaagagcaagccctgggcattctctaattatgtgctcagttattctgggccttgagatgaataaaagttgggtgtctttctggtgtccttctggttgctatattgtatattaaaatggtagcacctcccttttctgttgtcttctcattgttcaatcaagactatttttcaagacagggtttctctgtgtaacagctctggctgtcctggaactcactttgtagactaggctggcctcaaactcgcaaggctacacctgcctttgcctctcaagtgtagggattaaaagtgtgtgccaccatgcccagccaagcaagactatttttaaggtctaggaaatatgtggacttcagtgcacctaactcctcaatccttcacacccaattaccacccaagtctttgatcaagattatcaatatatttattccataaactagcacttctcaaacacatgaagttactaatgatatgatactgaaaagtttctgctgcccagcctactaaaaatatttattgggcatttactgatcagttattaagtaaattgactgtgcataattgtcataggcaatgaacaacctagattgtgccagtgctattgttatattatatatagataattaatatttaacaaatgagtttataatatttctggtgataaaatacgttaaaaattaacagcactaacgtgggagctaatttttacaggataactagtgggtgatttgaagcagaaagttgaaagaactcaagaggcagcgatgcaacctgctagggtaaagtccatttcagaagaaatgaaaaattatttcaaaatcctgaaggcagaaccatgctaagtaggttgtaggaactgaattgaactccttgtagatggaactgagtcatcaggaagaatggcaacgtataggacctggatagttgttcgcaaacacagcatgttagaatcatgtggggagctttttgctggctttcttttaaaccaatgacccaaagaagcaggtcagacaatgtaatctgaaaaggctgtgcaagacacagtgccccatagttatccctacctgagaaagataaagagatccctcatatgaattcaatgataagagatttcataccagaaatgagccatgctcaattcccccaaaaataaaagaggatttgggggtttgggcagttggaagtcaagttccattgtgagtgaaggtctgagccaatggcttgcacttagggtgagtatacatgaaacttttgaaaccgtgcctggcatagagtaagtgttgcagaaatggaaggaactgctaataaaatagtcttctgtatgcaggaattctgcattaccgattcaaccagcccaatagagcagatactggaacgcaactgcagaaactttggaaaagcagaatttgaacttgttgaatgagcactacagaaagcagcgtgtaagtagaatttgaacttgttgagtgagcactacagaaagcagcatgaaagcaggcctctgtatactcttgctgcttcacagatacttaacctttctctagcactctttgagaactgtttgcttgagtcctgtgcaagtttagtattacaaagcattaattagatggtatgcatgtagtaaatatgaacaaatatttttatcattactccttaagcaatacatgataagaattatttatatatcatctattttttattcagtattatcctcatgggatgaatttaataccttggaagattcatatggcttatatgaaaaataaaagggatgagcatctaaagatgtcggcatttataggaagtgatggaaccaatcttctattgatcccaaggcgcaagtacagcatggggactgagatctagggatttaggttcaggtcgagttagatcaaatggacttgggaatgactatactcacgtttaatttagatagtgaaaatactcacccttaaaaacgcatgtaaaattctggcaaaacagtacaaagcctagaaaactgaatgaagaacttggatcaccaaaatcctgagaagttaaagaaaatttgtgaagaaaaatagcagtgcaaatgtagaggggaaaaataagtagacttgaagttttcagaagttcatgacagccagaaagcagcagagctgcagtaagtactgtatggtggttgtaactttataaacccagactctctctgttgctcacaacttcaaaagatgagatttaagtgccttctcttgactatagcctgtatttagtggcttgtttttaatgaaatacaatctataaaagtgatggtgtatggtttaacaatatggttcagtgtgtaaagacacttccagacaagactattgtcattagttttatcacacgatagaaggaaagagtggactcctaccagttgtcctctgactccacatgccaaaggacacacatgctatggcatgagggtgcacatgcacacacacacacacacacacacacacacacacaatatgtatatacatattagtctgtgattactctaattgtatagcagtttgttatgctgtctagcctgtgagtctgtttaattttggagtgtggttttttttatttgtaagtttttataataaagtttaaaataaataaataaaaatcaataattaagccaagcggtggcggtgcatgcctttaatcccagcactcaggaagcagaggcaggcagatctctgtgagttcagggccagcctggcctacagagtgagttctagtacagccagggctgttacacaaagaaccctgtctcaaaaaaacaaaacagaacaaaaaaaaacaaataaacacaatacaataattaaaagatgagggcatgtagctagcaagcttggtccataaaagagccattcttattgctctttcttacacctctacctcttagagagcccattttcagatcaagagcatactaagtagccctattaagaggtttctttccagtggccagatcaaactcactatcatatgaatggaccactttgtacaaagaccctcccattctagccaatctttgcaaggaccattgctgagagagaaaatctgtcttgcccaaggacactcaattgcttatcccatataaagtggtcagccatgaaaccatatatacataatcagcaccaagcagacccagcaggctgtatttatataatatatatatatattatatatatatatatatatatatatatatatcaaaagcaaaagaggccatcaatttaagaagtgatgggtgacatgatagaggttagggggagagaacaaaggggaaatttagagggtggaaatggaaagggggaagtgatgtaattgtattttaactaaaaaattagttaagacaatgttatgagccagaatcacccataaaactattctcaactgatttgacttaaggcccagtccaccagatggaacccatacctctcactgcttggttgaccaagatccagggaccagatatcccagacacctaggataaaatcaaatattagtctcaaaaaatagtaataaaatgactagtaatgatattatactatgcatagattggtaccttaatcagtcattatcaaagaagcttcctactgcaacagatgagaacagagtcagagacctaccgtcaaacatgagagacggggaacagctctaaatggggtgtctccatcaaatctcttcccacaatgttcagggaaaaggaggaaaacagagtgtaagaggcagagagaacagaggacaccaggagaacaagtccctctaagtttcacgtgtaagaattagataataaatacatcatattcaagttttgctatttgaccgtattcacattttaaataggaaagaaaaattcaccgacttcttaactacttttatggggtttaatgcactcattaccctgtatactgttccaaggttgagtacaaacccacttaggaacaggatggagatgaaacactaccagagatctttcccttcacccacttcctgagccttgactaacagacatcttatcctgcagcaagtcatgttccaagctcaggcggcagaaagcttattttttatagcaatccccaaagcatggaaaaacaaacagatttcttggtgtgttaatgcacaaaagctgtgctaagaggcagtcactcttggcagcataaaaggtctgattgtctatagatgtttgaccctgaggccatgtcatctagcttcccttttgttgttttgttttatctctacgaaaatttattgaattttcctttcaagctacaaaatcagaacctacttattgtaacaataaaaaaaaacattgccagcaaataatgaaaaaaaaaacagcagtgtccctttttccttcattccccaggtaatcagtgataagtttgttcttcaacctgctatcttttctctatgaattggccacatttgttttttaacctagactatccaacatgaattactttggaatatgtatcattttcacttaagacatattacagttgtcactttagattaataaaaacagataaaattcattgttttatacagttgtgtgaaattatatagtgtggatagataataaccattcccttgctatttccagaatttatgatcacacacatagctcagggtcaggaggaatatttccttagcaataaatcatttgattatcatgcacagggctctgggtttgatctcacacacaagctagaaagtgatagatgatagaaagacagatgatagatagatggatagatgatagataggtagatagatagacagatagatgaggcaatgggtaattttttaaatttataattatattttgtataaatcgaaaacatctttagcctttcacggttataccatcagaaaacaatacaaatacacaatataaatttatcaaaacttttacagtatgcaacacaaaatggaatactagtaagggttcccatttctccacatcctcagtgtggttgaagaattctaaacttccagagtctacagtgaagatagcatttcaaaacagctttagtatatatgtccctattagccacgttgagcattattcatatactttagaaaactggttgttctttgtttttcacaaaagtttgctgaaggagacaactaagcagtgtggacattttaatttgttttgaattgtttatttttagttgaattaataaatcctgttagttagagtagcttttgtttaacagcaaagttgaggtgaaagttcaaatttgccacatatcccatccctcgccagcaagtggcctcctctttgtcaacccaacccaaccgtcatccatgtggcacactttttacaatctgtgagccagcactgatacatgaatatcatcattctaccagtctgtccgccgtgctctgctttgcgttgtttatgttttgccagttttacaatgcacatctatcacagcatcatacaaaattattccactgtcctcaaaaatcatcgctgttccacctatttatccttctatctacctctctcctctgtaaccatgatgggtatttttgacatatatctgatccttccacatggcctttgaagagtgactgagatcctttctgaaagaggaagatggatgtggtagagatggctaccaatggccgcagtggaactctgggctgatagtctctgaccgaaacaaggtgaacgacacattccatgctgccgtatgtcaaaatctgatttttttcatggagagagagagagagagagagagagagagagacagagacagagacagagacagagacagagagacagagagagagagaggtttgaacctcttcatttatcctatatagagaggtgctcccactatgaattctgatatgcagagaaaatgcaaatcctttattttgcccataatgattctgcatgttaaagaaacttcctactcattggttaagatgtatgaatgcactacatggcttagtctccatcctatgcaccaataatttgaagagttcctttgggtagcaggctctaatttgtggaaaaatgcttagtttctcagggtaatactcacccatctctgttctcaagatgttacattgggtggcagcaatatatcagggatgataggaagaaaatcctgcctccatgtgtactcactggcccccaagtaagctaagctgtgtgcccagaaatcctcaggtatctgcctgtctctgcctccttagaactgggatcataggcatacaccactactcatgaaattttcacatgggtagtgggagtctaactcaggtccttgcatggcaaacgctttgctgcactatctccctagtcctgatggtagcatctttgtcacagtcaataccattggttgctgctgcattcacagagaactctgttcctgaaatttctctgttatacagacaagctgaaagagtcacaattcagaatcatctgtgtgttctaagatggacatctctgagtgaccactgtggagctggccatacctagaatggttttagaaatggcacactagtgaagaagtcaaaggcattattggctcacatagaagtccatgcccagtcatcagcaggaaagcacaaagcactttcatctttcatgagcgcttatgaatgccatgcagagctcttccataaaatgacctaacagattagctctctgtgacctgatgacaggggcctctctaaacctggaacatgatagctaaccaggatttcctgtggaatatggttaacaaagagcagcgaggcttcttactgctataactgccctagctcctaggtctgatatgtcaactgccacaactccagtttcctttcaccagagaggtagaaaacagtattgatcacttcctcccatacttaaatgtcaagctactattcattaaatgacagctagtccagagattcagctcttatcacagcatctgacaagttcagagaagaaagaaaagaagggaagaaaaaagtgagtttggaattaagtattcagggactacagtgagacacctttgtatttggtggtttctcatcatgttaaaaaagaaaaaagtaaagaaaaaactctactacaattaaaagagaacattttttaaaaatctagtattcatgtctcatgtgagatggctaaaatgccaaagctttaaggactattccaagagtactgtgatggggcaaaagtgcccaaaatgtgtttaaatcatgaggttctaagcattgttaaatgaggtaataatgagcaatatagaatatgtagagtgtgactggtttatgtgactctaaacaaaatcatccaatagtggcactcttatttgcatttctattgctactaaaacaccatgaccaagagcagcgaggagaaagggggtttatttcagtttatagacccatatcttacttcagggagtcagagaaggaactcaaggcagaaactaaagcagaagccatggaggagtgctgcttactgacttgctcagccttctttctttcacctgcacaggggtggcactgcccatgatttcctgagcccttccatattcatcactaattgagaatatgcagaccctagtttcgatttctgaaaccaatgaggctaacttgtagagcctgaagaagccaggcacatagtaaagtgctatcatgagggagggaagacaccttacaaaaggtgaggacgtggtggaacattagtggagtgcaagttcacggagggatactgtatgtggagagggttatgcagggctgggagtcagggaacagagaacaggagggagtagaaggaaatgttaacaaaaactaagcatgtatgaaaaagacccgtgaaacctactattttagaagtctatcaaaatatcatttttaagttgtgggtctagagactccctgcatgggtaaataatgattcccctagaagccataggctactgaatgaaaatccaagtgacaaatatggaacaccttcctataagttagtcagagaggcccaatgccccaaaataatgtagattattgccatttctctttgctgactaccaggacgagatgataagactctattgctaaatacatcatatacttggttgtagaatatcaagaaaccaaacagtagctgagctgaaagtttcctccttgatgtctaccctttcgtagcactagatggtactatacctgctgttgggagagaaaagttatcaatggtcctagatttgggagtaactaacctaaaccaatcattctgattggatttgaagcctactccacaaaagtaggaattttgcctggtactataaatatggtcaagagtccatgactagtgttgtggtttaaataggaatggcacccatagactcatatatttgaatgcttagtagggagtggcactatttgaaaaggattaggaagtgtggccttgttggaggtagtgtgtcactaggggtgagctttgaggtttcagaagttcaagacaggcctagtggctctctatcttcctgatgactgtggatccatatgtagaacattcagctatttatccagcaccatgattgcctgcatgctttcatagtcccctccatgatgacaatggactaaacctctgaacctgtaagcaatcccccaaagaaatgctttcctttgtaaccgttgtcatggtcatggtgtctcttcacagcaatagaacactgactaagacagctagggaagtcataagtctaaagtagcatgctgtcaaactgttttctaaatgcttatatttggacttattgtttcagctctcaaacttcatggcaccttttttcccataggtgccagttaatgtagagacttacagatggtcaaaaagctgaggataagttactgttgaattctcaaacctaaactgtaggagtatgctaacagctggctcagggatagtccagcatacacattagtaacttccctatgagccaaccagaagtctgccttgaggtcttaagatagctgatgtcatgatgacataggccaatgagagagacaacacagcattccagactggcactgtccctgggtactgggagagggtataagagatctgtccatacccttaataaaggagttggcttttgcttttcatctggctcccggagtctgcaccattgattctgccccttctcctcgccttccccaagaggctaccttcttggactcattctccccaacactaaacagaacatttatatcacttcactaactccatgccacacaccaagctcaggaaaaatcacaggagagtgtgtgggaaggatggaagagccagaagatgtgaggggaatcctttaagatcatcttctggtgtgaagggattattgcattcacgaactcattgtagttgtggctatctacagaagaaactcacaaaactggaccttgcaacatttcatcgtagatgacagaccagttcacaaagccccactctctccacaaaattatgggcagttaatgggtactaaggaagagaagtcattttcttcagtggtgtagccacatgccaattttgcccatgctctagcaaacaattccctacccgtgttcacatgtgaagccataattaaaaccagtgcgtcacacacacacacaaagacatcaaagcaaggtgggcaagcttgctgtgaagaagagggtttaagcaggacaaggaggccaataagaaagggtaatgagtaataagaagtcaaaatttattatacacatatatgaaattctcaaaagaattttaaaacttcagaaatgcctaggttttaaagtacatattctaagggtccactttcccatggagactttttgaggatcaggtcttcactgcactgtctgatgcatctgcagcagcttttctgggaacactctcttcgcctgtcaaatgagccagaatagagcatccttcttccagggaacatcaggactgttgctccctgcatccccagagccattccaggaacagaagtttctgtgaaactcagtgctttcagagcgtcctctccttcttagttagagcttccattgctgtgaagagacaccatgaccacagccacccttaccaccatatcctggtgctcctttggccctcaaaatgtacattttgtcatttaccctgctcagcttgttccttttcattataaattttcattagagttaacactagtaaccacaaaacagagtctgtaccaggctgtttcaagatttcctctaccatcagaattaatccaaaactcttcactttagccccaggcacactctttgggcaaggtcaaaaagcagccacttcaccaaaatatcacaagaataatctctaggcaacataataagatccttctctgaaaacacttggatgagcccctgacagttcaaataactcttagcaccactgcctgtcatggtccaactagtatggttccttaagcagtgcttagagtattccaccatttaccaaactccgagtaatcaaattccaaattcctccaaatagaaatatggtcgggcttatcacagaaacaccccagtccctggtgccaacttctgtcttagttaggtcatccatttctgtaaagagacaccatgaccacagcaactcttataaagaaaacactaagttgaggggattcacttacagtttcagaagtgcagcccattacaatcttggcagggagtatggtggcatgcagacaaacttggtgctgtaagagtagctgatagtactacatcttgcaggcaacagggtaaggcctcccatgggaaacaacaaagcatggcacatcaagctgaggcaggaccaagctcttcccccgcctgcatcaaggctgagcagggcatcctaccatagggagtaggttccaaagagccagctcatacaacagggacaggttctgattccactgcagggagtccccacaaaagaccaagctacacaattgtcatccacatgcagagggcctaggtcagttccatgctggctccctggctgtctgaaatcttaagaaagagaactacagaccaatattcctcatgaacattgatgcaaaaatactcgataaaataatggcaaattgaatccaagaacacatcagagaaatcatccaccatgatcaactaggcttcatcccagggacacaaggatggctcaacatacaaaattccatcaatgtaatccaccatataaacagattgagaaaaaagaaccaaatgatcatctcactagatgctgaaaaagcctttgacaaaatccaacaccctttcatgataaaggtcttggagaaatcagggataaaaggaacataccttaacataataaaagcaatatacagccaacatcaaattaaatggagagacattcaacacaattcctctaaaatcagggacaagacaaggctgtccactctctccatacctcttcaatattgtccttgatgttctagctagatcaattagacaacaaaaggagatcaagtggatacaaatcagaaaggaagaagtcaaactttcactatttgcagatgatatgatagtctacacaagtgacccaaaaaactctaccaggaaactcctacagctgataaacaccttcagcaaagtggctggatacaagattaactcaaaaagaaactgtagccctaccataaacagatgatacatttgtggagaaagaaatcagagaaacttcaccttttacaattgccacaaacaacataaaataccttgggctaatgctaaccaaaaaagtgaaagacctgtactgtaagaattttgagtctctaaagaaagaaattaaagaagatactagaaaatggaaggatctcccatgttcttggataggtaggatcaacatactaaaaatggcaatcttgccaaaagcaatcacagattcagtgcaatccccatcaaaatcccaacacaatttttcacagaccttgaaataacaattctcagctttatatggaaaaacaaaagacccaggatagccaaaacaaccatgtacaataaaggaacttctagaggcaccactacccctgacttcaagctctattacagagctgtagtcctgaaaatagcttggtattgtcacaaaaaacagacaggtagaccaatggaatagagttgaaaaccctgatattaacccacacacctatgaacacctgatttttgacaaagaagctaaatttatatgatggaataaagaaatcatcttcaacaaatggtgttggcataactggatgctagcatgtagaagactgcagatagatcaatgtctatcgccatgcatgaaacttaagtcaaaatggatcaaagacctcaacataaatccagctacactgaacctattagaagataaagtgggaaataccattgaattaattggtacaggagactgcttcctgaacattacaccagtagcacagacattgagatcaacaattgataaataggacctcctgaaatagagaagcttctataagtcaaaggacacagtcagcaagacaaaacagcagaccaccgactgggaaaagatattcaccaaccccacatctgacagaggactgatttccaaaatttataaagaactcaagaaactagtctccaaaacaccaaacaatccaattaaaaagtggggtacagaactaaataaacaattttcaatagaagaaactaaaatgtctgaaagacacataagaaattgtttaacatccttagccatcagggaaatgcaaatcaaaacaactctgaaataccatctcactcctgtcagaatggctaaaatcaaaaacaccaatgacagtttatgctggagaggatgtggagaaaggggaacactcctccactgctggtgggagtgccaactcatacagccactttggaaatcagtatggcaacttctcaagaaaatgggaatcagtctatcacaaaatccagcaattccactcttaggcatatacccaaaagaagcacattcatacagcaaagacatctgttaaacaatgttcatagcagtactatttgtaatagccagaatctggaagcatcctagatgctcctcaattgaagaatggatagagaaaatgtggtacatttacacaatggagtactactcagcagaaaaaaaaacaatggaatcttgaaatttacaggaaaatggatggaactagaagaaaccattctgagcgaggtaacccagtcaccaaaaaataaaccatgatatgcactcactcatatgtggattttagacataaagtaaaggattaccagcctacaatccacactaccagagaagctagtaaacaaggaggaccctaagagagacacacatggtcccctggagaaggggaaagggacaagatctcctgagcaaattgggagcatggggggaggctgggagctatgagaatgagaaggggagaagaggagacatgagcagaacattagggagcaggaattttgaattgggggaagaatagaggagagcaagataagagatacagggagccattgtaagtttaaagagaaatcaggcgctagggaaacgcctggagatctacaaagatgacaccaaataacgatctaagctacagaggagagtccaccttaaatgtcctcccctgataatgagattcataactaacttatatgccatcctatagccctcacccagtagctggtggaagtagaagctgacacccacagctaaacactgaactgaaatggaatccagttgcagggaaggagaagtgatgagcaaaggggtcaagaccaggctggtgaaatccacagaaacagctgaactgaacaaggagaaacccttggttcccagtctgatagctggaaaatcagcatgggactgatccagaccctatgaacgtgggtgtcagtgaggagacctctgaaatgtatggggccttttataatagatcagtacttatctctagtataggaatagacttttgtagcccattccacatagagggatactccctgagcctagacacaagggggtgggcctaggccctatcccaaagggcataacagactctgaagacctcaccctccctggagagcagaaagggtatgggatagatagggtgttagttggaggggagcaggggagaagggaaggcagaaggaactgggatggacatgtaaaataatcttgtttctaatttaaataaaaaatggagagaaaaaaagaaaaattataagatactcaggtaattttttattaacactttaaattttaaacctaaaacacagaactcacaaaacctagcaaaacaccaaaaatctgagtcatcttattctaatgaaaacaaatgctttcagtaacaaccacccccctgccccccatacattcactttctatggttacactaaccacaatcaaaacagcagatgagaagtcccaacaagcgacaatacacatgtactgaactgaagaccattcttagtgctgtaaccctcactctcccacccaatggcatgcatcctgtatgcagcatgtctacactgcatatctatcccctcagtggtcacctagtagccatcagatgaactgctgggatattttggtgtatttcttatcttacttgataatggctccaaagcaagagcattaatgacactgggaatgcagatatacccctgaaaaaaatctggaaggtactctcttctaactgaaatggtaaaacagtacacaatattttgatagaaagactacactcacatgctactttatagtatattataatgtactattttaaaatcagatattcttggtaatctcctactgtgcctcatttatatgttaaacattgaagtgagtattatatgtatggaggaaaagggcagacttgggaagtgtcctatttatgttttcccatgccccacccactccagcctttaatgtacatcatatggatacctattatatgttaaaacctttctacaaaggaaatatctgaccagataatcaatattaaaacactaatcttatctttaaaacttcttcagagaataaaaacaaaggaccttttcccaatttatttcttcagagcatcacctaccagaagctactgacaaggaccgcagcactatggaagctgggtaatgtatcacaattatgttgcgtttattccaggaatataaaaattgaggttaacactttaaaatcaatcagcttaattcaccacaattacagaaatgaaaggagaactgtctcatcatctcagcacatacagaaatccagcctccattcataatgatgaaacacatatcatcccaaacccagaagaaaactccgcaatgcattgtagagcatagatttattttgaggtatcattttgcatgtgcaaaatttattttggcttattccctaattctctgctccttggggtaataaagagctgattaatggagagcttaataactgtacacaaaagccctctgtagggggggcagtcatttcagagactcaacaaggcatttaaaaattaactgaatgtaacaggcaacttgaaacacaagtaacacaaaagaggctccagaaataaaaggacaagatgctgataatgatgcaattcaaatgccagtcacatttgtttctaggtacctggacaaggcttggtgacattaaaatgcttcactctagagttcagaggtagactctattgtactgattttaaaaataccagggctggagatttatcttagatacccacaagacacaaaattgtagatagttaattacttccacaaagagctgcctttatacaaggaaaaaaggaactaattttgaggaggaaggggaccagtgggagggaaaaggggggataaggaaagatgacgggggtggagtggctatgagaaaaggcaatgatatacatatgtgatgttataatgaagcctgttattgtgtatgctatcagaaaacttttcaattaaaaaaagcaatgtgcgttcgtgcgggcgtgtgtgcgggcgtgcgtgcggacgtgcgggcaggcaggcaggcgggcgtgcgtgtgcgtgtgcgtgtgcgtgtgtttttacagaactcatttccataggtcccaacttttccccaggacaggctggaatgggccaccacaagccacacttactattcatgttctttaccagacgtcaacatgggcttagagcccagaatgtcctaaggaaggcttctaaaacaaatgccaacaagcaccagtgtggataaaacttcagcagtttggaaactgatggaggatgtccttctgtatacatgtttcccttattggttgatgaataaaacactgtttggccaatgaggcaggaagataggcaggacaaggagaaaggaaacatgcaacccatgttgatggtgccattttgttactgtattttctcagacccaaatgaacacacggacactatattaattataaaactgttggtcaatgtctacagcttcttattggctagctctgtcttaatcattaacccatttctattagtctatgtatttccatgtggtcttatcttaccagagaatgcctggcacatcctttcctcccagtctctccatggtgtctgtttccagcccttctctatctacctttcccagaattttccttgtctcctggccctgcctatctgcttgcctctactggctataggccaaacagtgttttattcatcaaccaataagagaaacatatatacagaaggacatccccaatcaggaaaccagtgatgcacaaactgcattccccagttctggacctaatgtggtcaattccatgtccttgcactaggaccagaggagaggagaggagcctgcagatgagtaagaagtcaggtacagctcaacagcaaatcaaatttctgtagaggtttctccagctgtagaaccaacttcacctagtaatcagtgtattctctagggaacaaacctttccctgagtgtgtttaaaaaagagaaaggcagaaaaaatatttacccaacaaaatgtcaggaaaggaaaacacagatagaatcattttattaacagttttttcccaccctttatcacacattctccaaggtagcccactacctctgcaaactgcaagaccagaaaccctgcaggcatacatggcatggcaacccggaaaggtgcaaagggtcttagcagtgagtgggaacatctatcattaacctcagatcttgcagcgtctacatacatggggtgagacattcaggggcttatagcgtatcaataatttgtgaacagtttttcacttttgttctcaggtgccaagagtttgaggttctcaaatgtaggaagggatgacctttggctgacaaatcaatggtagttaattattaaaaggaaccattattgctgcatgccaaccttcaggggcctacattccagtaatgagaagatccagaatgatttgaaagcattcttatcagaaaacagccaggatatagagggatatagctgataaggcactgcatcccatttgagggcctttgtttcttactcaaagggtgggtcttgacttctctcttgtcactgccatgctctcttaaatcaaaaggggggaaaccctgagctcttgccttgcggataacgaaggaatactgagggctgacattcatacctctttcatcttgcttagaccagtctttccccagcatggttctccatcccctccccttctctggctctccactctctcattctttcttcctagtgcttgttgactgctcactaggtaccccagaaccactgggcacagaggtggatataaagaaatgcatagcctgacctctacttcagaagcttataatttgtctgcattgtcagttaatgaccaattcttccatggccttcaatccatcctcatcagtgtccttatagccttatagcttttcttttccaaagaaccataacatcctgtccaaagcctcctttcccctgactcactgtagtatcgtccagtatatattattgcttctctgcatgttaaatgtccactggatgcagactgtggaaatggaaattggtcctttctaaacaacgccattcatcccaaaagagactctaagagccttctctccactagctggacctgacacttcagctgctcgttggcaaacacagcccattgtataacccacagggcttcccagactcttttgtgttccaatccaaatttactcaagacccactgatttcaaagagatctgtgaggccttcgagctcagaagccagagccccatagtttacccctcctttcctagtccagtcttctctgggaaagtgtcatttactgcagtccccaaactaggaactgaggataaacaacatgacaaatcatttctgcttcacagggtgcaatgtgaagtcgctggaactgctgatgtttcataaaagaagctgtgcggtcgaaattatgtccaggaaaatggactcggttcgctgttgcctctggaaatattcccgacaatcttcactttaatagtttaaatttaatcaacttgccttctgttctcaaagttaaaatctcagtattaataaaccaataaaggcctatcagaaccagcacccgagcatatggtaagtgctcaaaacttaaataaatagatatttcttacatgctgcaacattctgcttctttactaataaatatttcaacatctaaatataatggcacaaagaaatttcctcctcctcctcctcctcctcctcctcctcctcctcctcctcctcctcttcctcctcctccttcttcttcctgcattgaagttccttccactatcatatgaatctgtaatttgagtgtaaattatcacattaggttcttaggaaaaatctttaatactctcaaaatataaccataagaacaacaatccaattagaaaacatgaaatagttctattctatggagttttgctaggcaagaaaaggggatgaacttttaatacataaaacaattagaatgggtttgcctttattagctttattactcattatctagcttttgaagatgaaaagagggatcactaattttgcctcatctagtctcatatagaaagtcaatgtagtgtagtttccataagcccttcttcagcaacacaaaaaaagtttgatatgctttatttttattcagtttaaactcaattttccttgagatttttcctttgacacacgagttacttagaagtataatatttggttttcaaacactaggatattttctacatagctttctcttactgattcataacttaattctgttgttataagagaatttactttgtgacattttaatcattgtaaaaatagtttgtcttaaacattagaaaacatcctatctcagcaaatctccatgaacatttaaaggaatgtttgatgtttattctgctactttaaaatgagatggtttataagtaaaaggaaagttaagtaaaaaaataaactatcttttttcttattctttaacattttcttgttctttatctataacaatttgtgactattgttccattggttattgagctagaataatttaaatgtggatttgcctctcttctcagttgtatgagtttgcgttgattttgaaagtccaatattttgtacctatagatgtgttgttttctgaatgaattgaagttcatcctttttgtttgttttaaggttatatagtcagtaacatttttgtttaaagaaagtcaacataattaaaacatgaaaaaaaaacaaagtcaaagaactgacttcctgttttaaaagattttctacaaatcaaagactacagtcattgggaatgcactagatgggatctggagagatagcccaggggctcttcctgaagacccaggttcagttcccagcacccacatctggtgacattacaacctttgccacaccagctccagaggatcccatgccctcttccagcctcctcaggcacctgcactcatgtggaatccatgcacacaaatgcacatgaatagcaagtatggaagtaaaataaactaaaaggctttattatgagagtaaagtgtagatcaatggcagcatggagacaaagccttttatgaactgatttccaaagggcttccatgactattcagtgaggggagattagttggtttaacatttagtctagggatgactcaatgtcctcatgatgtcagctagatcaaccattacctagatacaacacttaagacaaatgcaaccaaagaagaaataaatagaactttctggaataaataaacttttatgcctcataagtcactatagaaaaagggaaaagaccaatccatcagggaaaaaatggttgtgagtcactagtgtatctaaggtccagaaaaaaactatgacaagttcacagtaaaaaggcaaatatccaatataaatttttaaagtacaattttcacattaaaatgccttgcccttgttgctcggaaatgctttattgtatttccatagatttacttctgtagcccccattctactgcagtgatttatatgaatgctaatatctcagacttatagtctgggtgtgtgtagatttatggtaagcctggatatcctacattttttctattcaaaagtcatggttgtcccaggtatttcaatgtacattttaatttggattttcaatatgtatttttaaaagcttgtgcaatttcaattgagaccaagtttatacagtaacctagatgaaagacatatttttttcataacagtatttttaacatttatttgttttgtgtgagtgcatacatggggctggaggcaaacttgaagaagtgggttttctcctcccaccatatgaatcccaggagttgaactcaggcagccaggattaacaccatacgtctttatccactgagcttgtctcactagctcccacagactgatttctgaataagtcttttaaccacacacagggtgtacatactcatttcttcatgtcccctttcgtttgtcttggcaacattttaaaatatattcagaggcattcaaatatttgtaaaattaccattataattaccacgagatttaataatgtgttaagttgtcttaatttcaggcaatctagaaatataattgattatatttatcggccttgtattctataaacttttggaatttatgtattaatcctagtacattttctacccatttttggttttcttatgtacacaaccatccttatatgagaactacttatgcttattgttataattctgattccttgaatttatatatgttgccttatggcattggttaagagcaggataatgttaaatataggtgctaagaaaggggggcacctttgtcgtactcttattctggaagagaaagctttctattttggttgttgtttattttattgtttatttattttttattagaaagaaaattattttacatgtcaatcccaggtccctctacctcccatcctcccctgtttccccatcccataccctttctgctccccagagagggtaacaccttccatagggggtcttcaaagtctgtcatattctcattgggatagggcctaggctaacccccttgtgtctagtctcagggagtatccctccatgtgggatgggcccctaaagtccattcctatggtatcaataaatactgatttactacaagaagccccatagattcctaaggtctcctcattgacacccatattcaggaggtctggatcagtcccatactggtttcccagctatcagtctggggaccaagagttttcccttgttcaggtcagctgtttctgtgggtttcaccagcctggtatggacccctttgctcttcacacgtccttctctgcatctggatttcagttcagttcagtgtttagctgtgggtttctgcttctatttcaaccagctgctggattatggctatatgatggcatatgaattagtcatcagtctcattatcaggagagggcatttaaggtagcctctcctctgttgcttagattgttagctggtgtcatctttgtagctctccagacatttccctagtgcctgatttctctttgaacttataatgtctccctctatttattatctcttatcgtgctctcttctgttcttcccccaactcaacctccctgctccatcaagtctaactcacccctcctcttctccccttctcattctcctagttccctctcccctccccgcatgctcccaattagctcaggagatttttgtcccttttcccttctccaggagaccatgtatgtctctcttagggtcctctttgtttaccagcctctccggcagcctgggctgcagactggcaatcctttatgtctaaaatccacatatgagtaagtacacacaatgcctgtcttttgtgattgggttacctcactcaggatggtttcttctagttccatccatttacctgcaaatttcaagattccattgcctttttccccgctgagtagtactccattgtgtaatgtaccacattttctctttctgttccactattagtcccaatggtggttgagaaaaggtgcctgctgttgttaggtgaccagtagattttcctgaaggagagttcaatttttcctgttttgctacgtcagtttttaggtaatatttgactttttttccttcattaggtattacctgataaattcactctctgatgtatttatttgttacttgggaaatcttactagtttgtggcacatgatctgttttacatgttgttgggtgttttgttggtggtgtttggtttgctttggttttgagtgtgatggtagtggtcagctagctgtcatggtctttctgtgtcctcctttcagcttgagtaattggctcctatagctctgcctgacttgtatgttcagtactggggatttgaaggcaagtcctcttgtttccaaagcaagcactcataaccattaatccatctcaacagccccaatattgatttttgttactagcttttgcatcaatgcttataggataactttaatttttgttattgaattatatgtgaagactttgtcttagtttgtttgagtaaatttaatttgttttatttaataatacatggtaattcagattttctgtttcatcttgagttaaatttgatcacatatgatttcaaagagtttacctatctcatatgtgcctaaatttattgactacaattttcatcatattcataatcattttatatgggcagtatctatattccaagtctttctttagtcattctttcctttccttcctggttcagctagctagaagcttatcaactttgcttcatttagaaaatattttgattgggttgtgggacacatgcctataacccatcacagaaacctaaagcaggagaatggcaacttctactacatagctacaaagagataatgaaagaataatttggttacattgaaattatttgatttctttttttcttcatttttttgtttattgaaaatagattattttctcacttcgtatatcctgattatagtttcccctccctctactcctccaagttcctccccacctcctcttccctccagatttattccttctgtctctcattcaaaaccaggcttctaagagaaaacaaccaagcatgacaatataaaatataataagatgaagcaaaaactatatcacagttcaacatgtcaacccaacaggaggagaaaatgacattatttgatttatactccctgacttcagttcaaatatttaatgtttattttctcttatttaatttggctttaatttactctttttttgaaatgaaacatcaaataactggatactggccattctttaacaatataaacgtgtaaacatgtaactaacacacaaatttttatattttatgttttatgctttcacttccatttagctcaagataggtgccaattattattttttaaacattttattgccttgtatttatttatcttgtgcgcatgtgtgatgtgtgtgttttatggaggcatgcacaggccctcacacaactgtggaggtcaaaagaaaacttagaggagtctcttctctcctcttactttatggatctcagggaccaaactcagagagtgaagtgttgtagcaggtacctttgtctgatcaaccttcttgggaggccatgttccaattattcttttgacttgtcattgacctgtaaagtatttaagagtattgttaaatttataaacattcatagatttctgtgtgcatttattattgatttctaatttctataccatgttagaaaacattgtgccatatggctcattctgagtgcatttgtttcaaagttattttctattacttatttattttactttttgacattataattacatcattttccccttccttttcccttcaaactcccatatatccttcgtgctctcaaatttatggtctcttttttcatcagttattgtcaaattcatatatgtacatataatcataattatataggcacagcctgctcagtgtatagtgttacttgtatgtatgttttggggactgaccatttagaatttcataataggttggtgtgctcttccctgaggaggactatattttattgtttgagaatttcaaacatgcttatcaatgtgctttgaacaaatcctcctcccatccctccctatcttttgcactactcttccttcccaactccatctgctctttttttttgggggggggggtgtttcaagacaaggtttctttgtggctttggaggctgtcctggaactagctcttataaccaggctggtctcagactcccagagattcacctgcctctgcctccccagagctgggattaaagatgtgagccaccaccgcctgactcacctgctcttttttaacccatgccattctgtctatatgtgcatggttgtaggaccatcttctgaagcatgagtagtagccgctcaggggtcacatcatttaagaactgaccctcccacagcagtcatcagttgccagtagctcccccactacagatccaattttatgagttcctcccctacctatgctggtccctgaccccccaccccatttagggaaactctatttaaattctatttgtatatgtatatctttgaggaagcttctatggtagtttccaaattgctttggtattagtcgttgctccacctactcctttttctaccctgcactccattccccaccctcaccccacttaacatttcctcttccattaatccctttccttctttgtaccatctactttcttttggggggttgtttttgtttttgttttgttttgttttgttttttattcaaggcagggtttcttgtatagatctggctgtcctggactagctctgtagaccaggctggcctcaaactcacaaagatctgcctgcctctgcctcctttctatccctttttttcttaaaaccacatccaataatctccttaccagctatctggcttctatgagtattccaatccaaaaacacattatctaaagagtgtaagttaacatccacgtctctgcaaatgttacagatacttgaaatgaatgtatgttcttttgttaggcaagcatcctgttgtgcaagttggtagaaaatgtgcattagaacttcattatctttactctttctcactacttgttacatttattagaaagaactactgaggttatcaacatttatatttttctctttcctcattttagccttcaagctctgttatcaggagtgtcctaatttagaatgttatctctatgatatggactatctatttcatcactgtgaaataaccatgtctgacttaactaaaggaaaatatacctttagttgaatacaacaaatctgatagtgatgtatcctctatagtattcttgaaaatagtatttgcacagtatatcatactccatcttacatttaagctacattttcccatatgtttaaagtatgcttaatataggaaggtgtgtaacagtcttgtttcattctgatgatctcactattttaactaaacttaacataattattggtacagttgggactaatctatcactttgctattaatacagctgtatgaaccaccttttctttgttccatttttcctttttcctgtcttacttggattaattatgttttaagattctatctcatagccaacattggcttattagctgtacttctttgttctacttttaagtggttgctcaggggtttataatactaattattcacgtgtcatagcatacctttagaaaatattataccacttcacatacaacatcagatcacaacaatggattccaatccccctgcctattcatactgtcactctttccttacactttagtctgcatgactcaaactccaatatatattttctaaagatttaaaattattttcatttattaataatttgcattgaaagagagagagagagagagagagagagagagagctctgtgtgtttgactaaacattccacggcacatgtgtgaacataaggtaacaactttttggagccagctcactttctttagtttttaaagatttatgtatttatattctatatgtataggtgttttgtattcatgtgtatatctacatggtatgtatgtgcagtggccacagaggtcaaaagaaagcatagaataagatcctctgagattggagttacaaatcattgtgagctgccatatgggtgatggaaatcaaacccaagtcctctaggagagcagctggtcttctttaccaccaagccatctctccagtccccacttctcccattcttatatgagctctagagagtgaaaccatgtcatcatgcttgcattgttgagattgcaggtgcctttgcttgctaatgcatctggtggtcccttaaagttattttaaagtgtgtttgagatcaacttagacgctcacagtttctgacttccttcactcctttgtggatatccttctttcattgtggtattgcttttctcccacttgaagaacttttaatatttattgtagtgtaggtttgtgggcaataagttttcagtctgggctgaaaaatctcaaatgagtcttttttttctgaatataaaaatctaagcatacagacgttatccgtcaatactttagagataactgtgtcattgcctctgattttcactatcttccacaagaggcctaacggctttttataattctgtgaaaactgttctggcttaatttctgttgctgtgacagatacattgaccaaaagcaacttttggagaaaatggcttattttgcttacaattccaggttgtaagcaacctgggaattcaaggtagaaacttaaggcaggaacttgaaggcaggtattgtgtagcagtttactctacaattgaaactttccatcctgaagagaaactcattaagcaggaaggtaaacaactcacaattgctactgaagtcacctgaaaatgtccatatccactagtcccctccctaccagagtaagcaatgaaagcttaagagtggctctccagctaaaagaagctgcaaagaagactcagacaagccaagctgcaaaataagattgaggagatcagaccagctacctgaaagagacagaaaccaagccagttgtctggcagagatttaaatcaactgagacagtaggaaagacattcccaaacctggggagataccttccagctgtgcagtgctctatatgttcctatctttgggacctgtcacgcatgctggcgtgggctttggtgattcagctgtctctgagtcatttctgctcctctaagtaacccctcacccatatatctgtaagtaactcaaaaaaaaaacaaaaaacaaattggttcaccactttggtggtgtccatactttagtttgtgttagaatccctttctggagtgaatagggatgtgtgttgtgtctccccaggaaatgctttgtcatatgacagcagtctggcttgctatactacacattaacccaaatcaaagaactcacttcacagcaaaaaaaaagtatataagaaactattgaggaagatgttgctggctggctggctagctggctcagtttacgatcatctacctaaggattggtgctgctcatagtgggcctgttcctcctacatcatttgataaccatgacaattcctccaaagtgcccacaaaataatctgaactggggagttcctcagttgatattatcgtcctgtatgtgtataaggttttgtcaaactgacagttaaagctaaccagaacataagcaatttgtttttctctgtgagcttttaagaagattttcttttcattattggttttgtcaatatcgttcccttgtatggtttggggtgcaggaatgtaggaatgaaattgtgttttttctctttcttgtgtttcactgaactttatcttggagtgctatagtttggatatcattggagggattattggaaggttcatatttgggaagtttggttctccatggtggaggatgacagttaaagggacaacttttgagaagtgagacctagtagaagctaatcagatgaaaaagtaccaaccttgggagggattaaggaaaatctcatgcatctgaattagttcctccaagaatgggttatgaaagaaagaaagaaggaaagaaagaaagaaagaaagaaagaaagaaagaaagaaagaaagaaagagggaggagggagggagggagggagggagggagggagggagggagggaaaaggaaggaaggaggaaggaaggaaggaaggaaggaaggaggaaggaaggaaggaagaaaggaaggaaggaagaaggttccccagcctcctgaattttgtttcacatgcaatttaacgttttgtcatatgtttctcccataattccaagcctctgccaggaaacaggccttagttttggtttactggaagtggctggagctgagtaaatagtcctcaggtaaaacaacaactcaggggcaacccatcagcaggcactcccttcaccttctgctggctcagcaggtgaccacagtctcctgacaactaagatagctttccccaccctgcccctggaaagtccctagccactagtgcctcccaccagtcagccctcagactcatctttcctccaccaatcagccccagattaatccctccttcctggaattaccctaactctggcttaaatggagcttttgaccttcttttgggggtctccatttgccaccccaacactggatgaagaaagtgctcttgtttattgcatatgtgactattggtcttttgggggggctctctcagaccctaacactgagctttgttctagtataaatttgggttacttgtgggtcactttgacccttgtaatttcttcctaaattgtatgtggtgtatcactagacttgattttagggttaaagccaccaaaccctcaaagtgtgttcttcctgacatcttagttggatgtttgggatgttcagttaatcttctctgctcttcagccaggtctacagtgagaatttctatctgactttacatttccccataactgttctctgactgctttagctcatcttccctgatgcatgcatgcttcagtattctgtgacagaccagggtgggagatgcttctgctttttctagagctcttatgttgtgcagctacccttccccctgtactttccgtcataacttgcacagttttttactgcctattgtccaaaatctgataagagctgattcatatattttcccattaaaaatctgttttgaaaggaggaatcaacagtgttgcttccttgactgagagcagcagtgcataattgacttacttgacgttacacctttttttggatattatcatttgattgtgcttcagcttcaaatttcctgttatctcttactctgtagagaaaattttaaaaaacagtgctgtgctttccaccactggtgcagtgttaagcatgtcatcactgagcattgcaaagatgctgctcgaaagaggcttcccttctcagtcacagagtgatccacatggcaggttttctagcatggactggtttcactggcaacagattcctagtgtaagcagctttagtagcaccccagaaaatatggcagtaaatagtcacctctctcagagtctcttactgtagcaggctgcttccagaacatatcttatcccaaatagctttctggcaaagtctcaagtacaggtttcaagcaagttctcttaaagtgacaaatttccatttctctgccatataattcactgaggctttccctcaatgcttctggtcattggtccacctcctttggatcaggacccaccttgactatccttctagctaccgggtatatattcctcattgtataagcaggaactagaaaaataaccatagagtgggtacttgaactaattaataaagaatacatcgaacgctaaatgatacctatttattatctgacataaatcaactcagtagggcattgcatttcgtaagctggtttcaagatttaaagtaattcacaaacttgaaaactctctagcaaaagaaaggtcacgtgttcttgagggagtatccagccccactgattcaagcacacactgtaaatcttcacctaacctcccacaaagaatctgaggctatatactactgttattgcatctctgctattgcttcttgcagctgctgtatgtatcgtaactcctaatagtcttttaaagattttatctctcttttttaggcaaagcctctcacaacatctccacatgcattataagcttgcgatagcatgctaaatgtgctctggtgttgtgttttcaaacagttgagagaattaaaaggtatcttttcatatttacccacatagttatctcttctagtcatcttcatttctttctgtaaatctaaagtttgaatctggtgtcattttttctcaggctgaaaagcttcctttattgtttctagcaaagcatatgatttctccctttcactcccctgaaagtgtgtttactttgttttcattgttggtgctactatttcctgaatacaaatgtctggtctaactcaaattatcattcagttgtttgctgtgttccattatctatcattagttaaattactctgattgcatgatatattatgtgtgccatttaagtttttgcaagttttcaggatcctcatctttggttttaaattatattttttacatttattaattgtgtgtgcacgtactgttcaagtgtgtgtgtgtgtgtgtgtgtgtgtgtgtgttgtgagaggggaaatgcacatgaagtcatagaacaatttgtttgtgtcagtcctctctttccattatctaagttctaggcacttggattccagtggtcttcttgacagcaaatgtctttacatgctgaaccatctcactggcctgggtattaaattttagattccaagaaacataaatttgacattttttttcttgcttgggattcactgaaattcttgggcttaaaattttgtttttaactaatttgaataaattttaccaatgcatctttcaatgtttctatctatggtgcatccaatcctttctctttaagagtctgagtgtataggcattagatttttttcttgttgcccaagtcactaagactgctcctttttcacccatttttctatgttcttcagattcgatattttttatttggtttcaagtttcttgactctatgctacaatgttaccaaatagttaagtagattaacaaatttttcttttttcatattcaagtctagatttcttgactgaaaagccatgactgttcacttactgtagggagatagttccattagtccttgaacctatatatgcttagtgttttaacactcctgaatgctaatatacatcctttaaaggtagttttataaagatggcttcctcttctctgtgggtcagaatttttcctttgttcttgtaatgagcattttctaattgaatactaaagtttgcctatacatggtagtgtttctggatttattaccctcatgcacttgtgctgtgagtaggctccatttgaggacttctaggtttaacacaatgcttgcacttagcaaaatcattcactttaacctgctcccaccaatatacccagaactgacaaattacaccattctctcttcttgttctagactttctgtgtgtagcacttataaccctgtattaaaatgagttgcaagcagatgcctagccactcaaagcagcacacaaatattatttaacctatgcatccttagtacctagcctagtgcctgacacttaatgttgggatgcttgttatatttatagaaacaagtgaaataattaaaactcagaatccatttgattgttaagtcatagttcataaaatactgcaaaatataggggtcaattatttaagtaaggactctgatacaaactcagttcagttccaactaaatatatcaagttcccagaatttacattcaaccatgattataatagactttgttacaaggtctattacaagccaagaaaggacaatgtttcagaaagaaacaatcaatattgattgaaatgaagctttaacatgtgtaaagtaagggtttcttgattgtttatttggtttttctagacagggtttctctgttaatagtcctggaactcactctgttgtccaggctgtcctcaaactcacagagatccacctgcctcggcctcctgagtgctggattaaaggtgggcaccaccaccacccagaaaaaagtaaaatttatatattaatcatagtttgttctctgtttaaaaatattgaattatgtgcatgtatacatatgaataaaataatatgaagggtgggataggtctatttgtaactaggattcacttctgtttcactcttactcctacctctaatgactggtgttatcttggagaactttaaacaactatccacaggtgtggatttatctgagcacaaactgaatcataacaggaatgcttacattaccttgcaggagtgctatgggcatcgaactaagtcatgaatgtaaagggactttttggactgcaaagagctgtagaaataatagagatggtaggtccaatagaccatgtccatgacaaacacctgactttgacaatttaatgcaagaggattgtattggggctcagctttttggtgtatgatcagttagctgccctattttggggatgtggtaaggcctcacacagtggcagggaagacattgaacaaagctgatcctctcatggtggccagtgagaaggggtgggcgtgataaaatacagcccccaaggcaatgccccagtgacacagttcttcttttttttctctttttctaaattaattttatttaaattgagaacaatcttattttacataccaatcccagttccctctccctcccatcctcccatgccacccacagacccccaccaacccaccccccatccactcctcatggagggtgaggcctctcatggggaattatcaaagtctgtcacatcgtttggggcaggatctaagccctcccctgtgtatctaggctgagagtggagctattgtttactccccctcccatttgatttttttatttaaattagaaacaattttattttacctatcaatcccagttccctccccctcccatccttacatgcatcccaccaacccccccatcccactccctatccactccccagggagagtgatgccttccataggagatcatcaaagtctgtcacatcatttggggcagggcctaggcctgcatttaggctgagagagtatccctccatggaggaatgggctcccaaagtccatttgtatactaggaataaatactggttccacttcaagaggccctgtagactgcccagacctcctgacacccaagttcaggaggactggttcggtcctatgctggttcccaagctgtctggctggggttcatgagctccacttgctcaggtcagacacagttcttcttgatgggtccaacatcataaagtttctataatcttcccaaatagcagcactaggcggagaacatgatccttcagtacacgatgcttttgaagggacatttcatagcctaacagtactaaatgagataatacaaataaaccacaccttccaacaatgcccatcacatcaaaactccaaatcctagctccctgtgctctgaaacacacaaatgacctaacacacacattctctcacacagcaacagcaacaaagctgacatgatttttagacattttaaatgtctttttcaaagcaaagctctctattgcttttatgtctttaactgacttatcttccctgctcccttctttcctctctcttccaccaagaaacctgtactcattgataaaatattttgttcttattgttaggttgctgaagccatttgttcttctaatgtgtcagagaatgtaaaaacaccaagtaaaacttttctctggagaagttacaaaatcaatgctgtgaagatcacatcatagaaattttgagatctatgataatctttttataacgtttttctaaaagatacattttttgaaatatcttaattcttgatgttatatctcaggctaaagagcacttgcttgtaagtttgtcgaagctattttcctgattagagttcaaacatattgatccaatgttagtcccagttccttcaaaataatgattttttcctagttttaaaagattcattgttgcaaatatgtgagaaagtaacaaataatgtaaacagttctacaaggaggaaaaacactttcaagtgtgttcccgtgactgttacctctactctgctcatttttttctagttaactttgtatgagagaagtctaaaagagggacaggggaatgatatgccttatctactaacatggaaatccttgaacacaaccttccactaagtcagtgttcacacaatcagcttcctggagatgtattatgcacctaatgttgctctgctaatactcaacttgatggtggatcaacagaggagaatgaagcccctatcttcctaatacttcaggatttttcaccctccctcatccaaccacacatcagttgaccaaatgccacacaaagttagtgaaataatactactctgtgagttcttccctggtctcctaaataaacttgtccattttgatcttatatttttaagaatatccttaacccaaacaataatacctcacatgggccttcagcagggttttgttgttgtttttgtgcttcttgtcattttgcctgacttcccccattgaactataaataacattaaaaaatggtttctgcattactcattattggagccccagaaccagttaattgcttggcacatagtgcttgagaaatgtacatagattatataaataacattataggcgttttttgatgaacaaaagaattgaataaaagtggtactaaatgaatagagatatttgtaatgcacaaggggagaaaaataaaataaaggaacatgagtatggcaagatattgggggatgattataagagaaaacaatgaaaatagccccacattagcaagcaatacaggtattgtggataaattataggagccaagaacaaatgactcattgtccatgactcatccaactgggaggatctggggctgcttaggtttgcccactcatttgctgtactccagctgtctcctgtagtgagtctaaaaccatgcaaagcatgtaaaacaactcccctggtgggttgctcacttatttctaagtgttggataggataggagtggtgccaaacacttaagtaatggggtaagaaattgtaagccctcgataaatattatatttacccctgatccccaaacatctcccatcttagacaaaataaaattgcaataactatgtgagaaaaatagatgtataaacggatgcaccctgagaatagtaaaagaagacatggaaacaaaagtctctaaaagaagaaattagaatttgtttcctatttgtgcaaagaagagatacttatattgctacaaagtctttaaaaaatataatggaactcccaactgggtaagactgtcaatgacttttcccccagaagactatataggaccttgaattagtttgagagctaaccaatagacaggaagcttcttgtttagtacctacttgattgttccatgtcctgtgaccaatatgtgtactgtcttcagcaataggtcttaccaccaagttataattggcaaccaaaagtaatgacagcttgctttggtagcccttggacattatcagagaagtttccttgtgcagggcataatagttaatgcagaaactcccaacaggtctaagtgtagagaataggtatctggggattgctcattcagcaaatgggacatctacatcacacatccttcacaagtctcagggactgtcacagaaaagcaggcaggaagactgtaagagccagaggtcagagagtgttgaagcaaaacaatgtcttctagataactgtctactatgatttcattaaatcataatagctgtggtttcctgcaaaaagtatagcaagtcaacattcttacatgaagtaggattgggattcatgagctcccatccctgagaatctatgaacagttgatggttttggatagagggattatcaattttcttaaaggatgttgattcctgagtgtagatcagctacactctaactgatgaccccacatgcagaagtgtatggacagcacaaattagaagtgatggattattaaataaaaacaaaagagaaacagaaagttaggtgttgagattgggatggagatgggaggaatttggagcaaataggatcaacgtgcattgtatggacttctcagagaattgaataacaatattttagattaatatagtggctaaatatattcatatttatgcagaaaatttagtgaattgtttaaaagagttcaaaacattctgacaaccctagcataccaaagtaattgtgagacttaggctgaggttcctcttgtaggaggctatcagggggctttaatcaataactctgacatcagccattatgcctttgaactggcatggtttcacacaaatgacgcacacagaggaccctctacatccagcctggacttcctcatgtatctatagaacagagaaagccacaggccacatatgagttgctcagcccaatttctgtgagtcagaatggaaaataagaactacagatattcgatatatagtagccatgggtgtcacaaagttggtaaaaaaaaaagttgttttcacatctttgtctcttagaaaattttccagctcttttctgagtagagataaacaaattcaagtgggaaaatctgcaacacaaaatatccccaagtcctcccttttgagagttaaaaataatatactatgatcctggtaattttaacataaatacctgaagaaatattaaatttgcacagtgtgcttcaaggataaaacttaatagcatttaacttaaactctggaatcagcacagcccatatctaagaaagcaacctcaatttcatttcagctgctatgtaaaaattaaaggacaaatgtttccatagattgaacagagtcaatatgaaaagtatgagaacaaaagcagctacagagaagcttcgttggtatgttttctttactgattagcctatggaaacaagacatttttactttggctgtataggaaaaaatagatgtagaaattgatagtatttaaggagtcaaaacagctaaataatgaaatatgggtcttttttttgcaaaggtctttacctttcagtcaataagaatggagcaaatcctctgtaaaatggctacattttaacacatcaggatgaaggccttttctcttgagcaagaagaaggaagttaaagctgttgtccctgcaacttattgtccattgtcccctttctactatgttacacttgtctcttctctacattgaggatggatagaggactggattgtctgagagtctatgtaaagtggaagccaaaagaggtttccaaaccaaaagcatctagaacttaaataagtaagcttaatccaatagaaaatgattcttagacctgagatccaacattacagccaaaaatttgtcttctgccatcactgagacattaaaaaaataaaggcatttctactctctacattattatctttagtcattgtattttatgagcatgtagatcgtggcttattggtgagtagacatactggattaaagatttgctgaccaaaaacaaaagtaaaaaatctgttaagaagtgtttctgcccacggctctgcacagagcatccttgacctctttgttcctgagactgtagacaacagggttcagcaagggagtgattatggtgtatgtcacagagagaagaagatctttttccactgaactttctgacttgggtttgaggtaggcaatggaggcacagccataatggacaatgaccacagtgagatgagaggcacaggtggcaaaggctttcttccggccttcggttgaggcaatcttaagtatggaagagatgatgaggacataggagatgaatatcagtcctataggcacgagaatcacaaatgaacttacaccataattgattatctcattgagagtggtatcaacacaggaaagtttcattactgggtatatgtcacagaaaaagtgttccaccactgtaccacagaagggcaaattgaacatggctggcacatggagaactgccataaccagaccggtgcccaaagatccacaaaccaaccaggcacacattcctttgctcatgatgaccatatatctcaggggatcacaaatggccacataacggtcatatcccattgctgtgagcagaaagcaattgttggtggccagggtgacaaaaaagaacatttgggttgcacagcctgccaaggatatggcaagattgtgaaaaatcaggctggagagcattcttggcacaatgaccagtgtgtacacggtctcagaacttgccaacatgctcagaaagaagtacatgggagtgtggaggtgatggtccatgcacgcgatcgtcacaatggtgatgttgccagccagagttaaaatgtagatggttaggaaaaccgcaaagagggtcatttgatgatgtccaaagctagagaatcccaagaagatgaattctgtcacttcagtgaagttctttctctgcattctgcactattggtgtctaaagtgacaagaagggccatcaagaggaaactttcatcagcaattgaactttaaagtagggagtaatgatagctgacctgagagagtgaacctacttccctcctttgtgaccatcatgatcacatctagagtatttgtccatgaaatgagaaaatttacacatctttttggaatttatgtatgtaaaaatgagcaaacattcctgtgcaagaacacttcctagtgcatgctcacctcacacaatatagtgatgttaagaaatgaaagggggcaggacagagacagacatgctctgttcctcacttaaacactcttaacaagaatcaggggtaagagaggatgggagggagagggaacacggggattgatatgtaaaatgattgtttctaaataaacaaggaaaaaatgcacacaccaccacaaattgtatcaaagaaaagaattaccaataaaggacatgccaagaaaatcataaagatggatgtatatagacaaaatgaataagtagtaagaggtgttggaggaagatagactttgaaaaaaaatggtgacaaagccaagaaccttttgacatagcgatgcaggtaaattctgaatgtgaaggcttgatttcatcaagaaaatatgtgtagggtagatcatactgtcaaagaagaacaactacaaaatggcttctaacacattcagtccgctaaaactgaccacccaaagctcaaagaaatatttatttgctgattgtagtagtgtttggggtgaagtcaaggaaagacttgtgactgagaaaacaattagtttctactgtaatcaaaaagaatacttaagacaatgtgagatatagagaaaagaatatagacttcatagtttgagagggaaagagtgggctaggtatttggagcccagctgatgcctattttgaaaatcaccaaacagacagtttgatgtaattatgagactcagagaatagtagtctcttgttaaaaagagagaacatatgggatggcaatttcattgcttatcatgcttgagggcttgggttcaatctccaaagctgcatggagcaggcatgacggcatacttggaggtacaggcataaggataggaagtaaaggtcaccctcagctgtattgtgagctcaaggcccacagcctggaatgagaggggcagagacagacagaaagggagagagaggaaaatataacctgtaaggagagcatgcacagtaacaatttcattattcctgttccatttccagggttgctaaatagaattcctttatcacattctctaattctttgcctgttggcatcatgtgatctatgcttatgataccattctctcagatgtcactggagaagtctccattgctaaagatctcacactttgttttttcttcctttccctgtcctttggtttgacacatctgaccctacctcatggaaacgctctttagccttggtttccatgacaccacattgtttctgtcatccctgtgcttatgtagttacttccatgaatctgttcattctgcctgtaccatgactacattcctgctctctggcccatcctttgcccttgctttttctatccttgcaaattcaattttctctgttgtttctatgttgattgctttcaaatatctatttctatcaacaatattttcccaaatatccaacttatttctctcttgacttttgtatgtcatgaaattacaacaatcttttttgtcattttataaatttaaattataaacaagcttgttttacatgttaatcccagttccctcttcctcctctcctcctctgacccatcccctttatgcccgccccagggagggtgaggacttccatggggatcttcaaaatctgtcatcttttggagcagggcctagaccctcccccgtgtgtccaggctgagagagtatccttctatgtggaatgggctcccaaagtccattcttgtactagtgataaatactgacccactaccagaggccacatagattgcccaggcctcctagctaacacccacattcaggggatctggatcagtcttatggctggtttcccagctatcagtctggggtccatgagctcccttttgttcaggtcagctgttctgtgggtttctccagcctggtcttgacttctttgctcatcactcctccctctctgcaactagattctaggagctcggcttggtgtttagctgtgggtgtctttatataatttttaaacaaattataagtcatccattgtccactttttgtatcttcttcagtgacctcatgatatcattatagtcagaaaattctggcatcctgaagttgcatctactatatgtaaaattcagtagactttccttaagttcttacctaattctgtccaagtttttagaaccattgtgatgtgtctaatgttaaggtgttcaactacctgtcataactcgggtctataatctcagcactgcatagcagaggctgaaggcttacaaggctcacaaccaaccccaatcactcagaaaaaacctgtctccaaaaacaacaaacagcaatcattaaagtatataatcctctaactaaggaaacaaaacatattctcagtctaaaaatcatatgcctgggggctggagagatggctcagaggttaagagcacagactgctcttccagaggtcctgagttcaattcccagcaaccacatggtggctcacaaccatcccttatgagatctggtgccctcttctggtgtgcagatatacatggaggcagagtgttgtatacataatgaataaataaaatctttttaaaaaatcatatgcctatggaatgacaaataattttggaaaaagagctataaactttaggagccaccctacttcagttactaaacagacccacatggtatgacatggacacaagtaggactctacaaatcatcaatgctgtggttctctgtggctaccatttcattgccccttattcattctcagaattactgaggcagacttcttctatcacatgctgtaattcctagcaagctggattgactaagtttatcctcataaacctgttcattcagatgcctctgaagaagttgccatcactagtgctgttggccttttgcctttttccaacttattctcattcttctctgcttcatttaacacttctgtctactgccccatgaaacacagaaagatgtaattcagtattcaaaagcgtaccatttatactgagacactcaggtgtctcaatgacacattttcaacaattgctcctagaataagcaaatattcatgagggagaaaacaaacctcaaattttattccatgacacatgcagaagttgttgtaaatgaatcacaggcatgtttaaaagacaaagtaataagaaattcgagacaaaaataagagatgaaaatctgtgaccctcaaataatgaaaggttcttaaagaagtaacaaaaggtttaaattaaaacagagaaaaattgtagcctaagcttcttcattgttagaaaaacaaaaagataaaccatgccctagtagaaagcattcacaatataaaaatctaaaattatatgcagaatatataaagaacttgcaagtcaacaataaggacacattttaaataggcaaaatatttaaacatttttaaaagattacataagattcctaataatcatatgaaagaattctgagcaatgttagccattggagagatgcaaagtaaaaccacagtgagatacacctactcaagtggctaaaattaaaaagcctaacaacacccaatgtggtaaccaagtaaaagaactggaagtcttaaatattaatggttagaatgtaaagtgttgtagcctatttggagaacaatgtggcatttttcttaacttaaacctataaagcatctatgactcagtattttttcctgagaatttatacaagagaaacaaaaaaaagtgtccacaaagagttatttgggagtcattttcctaaaagtccaaagctgcaaacgatgcaaatgtctaaattatgatatagctatataaagaaatattcccagataattaaaagtgaaaacagggtctggagaattgccttggcagctaaaacagttgtttcttgtgcagaggatctgggttcatttcccaggatacataaatctgaaaacttatcaaaattcacaaaatgtatacaaaaattaactatacactgtattagattttgttgcattacattgtatgacataatattgtgttatacaacattgtataataacatgctgtttgtctttatagtcctgtgaatgctaaacaactactctaccactgaaccacaccccaatcctcttgcattgcatcatggtgtaatattttaaagtatactccactagagttgatacttacaagtattctcatttgacttagcaagattaattctcagggggtaggactgcagaggaacactgtagtatgagaaagattggaattaagtaacacttagaaaacctggatctggattttgagacttatggatgccaaaacatgagatctgggacaggtcttgtttttgtgtatactgtggcttcagactgagagttggagttggagagttaaacaaattgtctgagttctaacatcctagtcaacactgctgttatgatctgagaaagacatcactactggactgataaggattgccacatcattctcagaaagtcaatatgctctataccatctcctccactctacgatgatagtcttccctgtgcatagggacattccaatatccattatcaaacctgtgcctatatccatatttttaaatcttacctggaatggcttttatttcttgcaacctattcagatatgaggcccttagtacttggaagaacacccgcacccttcccagtacacatctaggtgacaagtgaaattatgttctcactcttggatttaaaactgtagaattctaaacctatcaaactagaatatatctatttttaatttttaaaactgtttcatataagcattttaagactcggctcattgcctaccacatccatgaagtcctgtcataacagcccaattccgcactcccccccttttttcataaagattgtacccactggagtactgaatcctgtttgcatcacctcaccacagcaggctgcacacatcatttcccagctccatattcaaaagttgcatgtttgctaaattgaaatctatggagaaatatttttatctcaggaactaacaaatattaaaaatcaagacttgtttatttcctgagagttggttgttaatacttaccatacaccacttattgtagtttaattccccgctgctttgtgaaatgttgtctgctatctcctttggggtatttccacttcaagtcaaagtgtaaagtctctaaatacgtgctaaggttactacatcaaactcaaggaagcactcagtaagttctccctggctcaataatttagaatcctcattgcaatgtaatttagctgtttgacaaagggacagaggtgctacccataaaaatagtgggacctaaaaggagggacacctctatacagcttcctggaggggaaagtgatgtatttttccacctttcttcacatcttcctgcaaggaatcaaatgacactgcaaatctagaacaactttgggaagggagaagagtggtttaagaaagagaagatagccaattcagagagttttcacttactgaaaattgagtatggcagatgacagtgacagggagataagggatgatagagttggtcagcttttcattagtaggacttttcaggccttgcttctgctttgtgttcaatgcatctactgtccaagttaagagtttagagttaggagaagtattagcaagtcatctgtgtatatcaacatcactattgctcctgagccctctcattatggttgttgcacagatttcaaactcacccattcttcaatcagttgctgatatcaatccccaaatataacacccaagtgactgtgtaactctaagaaacacgtttactctttcagtcacatacatacatcagttatataacagcaggactgatgtcaaataaatattgtgaggattaaatgatctactccacttaaggacttaggacacagtacatgtttgatagtttgatagttaaaattatctttggcatggatttgtagcaaagagaagacattcaggaatttctagaacatcaaggaaaacaaaacaacaaaaatacagtatgaattgatgaaagttgagagggtggaagagagggagggtttgaatagatttaccttccaagaaaataacactgaaaaagactaaataaatgaaaagtttgtacacccaatattttggttatgaagaccgtatgtcaaatattgaaaatggaaagaatttattatcaaatacattgatagaaatcatgtctaatttacaaatcttagtaaaagcagtgatgtaatagaaaactttttaaaactacaacttggatcagttccctgaaaattaatgtgctatgtaaatgactactgcagaaggcaaagaaagaaaactctagaactgcccctcctgagagttggaaacacagttctaaaataaagaaacttatccaaaaatctgtgattattatatccgtctgagtaatataaggatgaagaatgcatgaatgtagggaagaatctgtaaagttatgctgttagggactgaactcaacaagcatttttgtgatgtctcatttcaggtcttgaccaaggatgagcacagggccaattggactagaatatattaagaagaatatatggcattcccaacatatctcagatctgttctgaccatatctgcaaagcaatgatttttttttaaaaacgtctttatgcctcctcaaggaaatacctcagagttgctcacctctctccagatccagatagcagtgttgcttgcagaaacagtagtgtaggacacaacatactcaggtgttccccaggctctgaaacggatgctaatagaagggaaagcttctgtgagttcagagatgaggagggaatctcagaaggaagccatgtttctaccctgccctcttgggtttcctttcttcacttttccctgagcatctcaagggaaccagaagagtcaggttccaaatagataccaggggattttattaaaaatgaggtttcttactgtcttgggcattgatgctttgggatccccagagcttgtctcccaggtgctttctctccttcattcagaactttgctgaagatgtcaggtgtatggtccatggattttctcttcagaagacagtgcactcattgacttggtgtttccaaggaagaagacatttctggaattagttcaatctcagctggacagatttttcttagaaaaatcatatcccacaaggtggtggttgttggtacacacctttaatcccagcactcaggaggcagaggcagaagcagaggcagaggcagttggatctctgtgagtctaaggccagattggtctacagtgaaagttccaggacaggctacaaacctacagagaaaccctgtcttaaaaagtcatatcccaggtactaattgttaggatcccaagagactttgattgtgtataacagatttctggcatctaaagttccctatacttgcacaatgtcaactctccttggatgaagcaagttcctttccacaattgtgatggctgttcttggttgtcaatttgactacaactggaatcaactaaaatctaaaaatagatggcacacctgtaaggggtttttgcttaatttgaagtaggaagatctagttctaacccatatgtttgaggtaagaagatacacctttaatctagatctttcgagctgggaagacatgggtttttcatccagatattgtggtgagaagatacatgcctctaacttgggccacactttctgctggaagcctatgcaaggacacggaaggagcaagcttttgctctttgccttctttcccctctccttgctagcaagcccattcctttattggagttagagcctatttcttctggattccagtgaatgctgaaaaacagttaagacatccagtcttgtgtactgagcaactactgggttcttggatttcggttaacagtcagccatttttggagtagagaaccctaattaatacaaaatatatcccatgagatccttccaagactgtaagagtgaagtttcaatttttctcttcaattcatgttcattgtttgtctttcatactataaatgatagaataatagtaagatttgatatacctttattttttaaaaagttattttttattattttcaatcatatatatgtctatgtgtgggtatgtgaacatgcatgcaggtgcctacagaggtcaaaaagtggatttacagatgattgtgtgctgcccattgtgggtacggggaactgaactctggtcttctggatctgcaatacatgctcttaaccactaagccatctcagagcccttatgatataattttaattctttataacttttataatgctagaatggctcatgttaagcatacacaaggatcataataaatagtcatatcaactatggcatatgtttccatccagtgcaattaaatggtcttaaatctcaacactgtctcaatggaagtcaaaatacggaatttctgacttttatctaaatcctgttttaccttgtgttttcaatccactaaccacctagttcaattttatcttcagttcatagtgaccttgacacttttgcacagcccttaatattttcaaagttatgtgaagcaaatatataaattcttaagtccaccttcatttatctccaaggtctatgcctttctcctgttacaagtttctatcagttcttacatgtgacagaggcaatgtcagcattaagtgttatgataaatctttccgccaaaagcttcccgagtcctactgccacgtgggcggtctccgccagccacccaagttctgcctgccatgtggatggacaaaataatacacagacttctattaggtacaaatgctgcttggccaatgactaagattctcatctgttagctcagtcttaattatcataaatctatatattttataaaacttatcttatcagacaccttccattggtgtccctccttgccagtgagttacattgtgccgctggaggaagagcagaggggaaaaaggaggccacttcctgtttctccttgcttaaatatgagtctccttgctatgtcacttcctgcctggatcaccacttctctactacattcccagaatcctctttgactcctagtcccatctaacttgctgccattggccaaacaggactttattcaacaagcaataagataaacatacacagaagtacgttcccgatcaattaggtctaacccctccaacatatttttcttttttaactaattattaggcaacatacaaaagtttattatgacatttttatacatatagcattaacattgttctttttcaattaaagtttttcttatattttgatcacctgactcatttaccaactcttcctaatcatctctccacccatataacttcatattctttctctatcatctatctcttgctcaaaacacacacacacacacacacacacacacacacacacacacacactataacaacaacaaaaaaacaagacaaagcaaaaatgtacaaaaaaaaaaacatggggtttgttttgtgttggctaactacatctgggcatgggcactaccttaaagtgttgatgatataaccagtgacaagtgacattccattggagaaaactgattttccttttgccagtggatatcagttgcagataacttcttggttagtggtgggagccagtgtccaactccccctctctatgctaggaccgtatttcattgaacctatgcaggtcttgtgcctgataccacagtatttatgagttcatatgtgcatcagtcctgttgtgcctggaagacattgtttccttggagtcactcatcacctctggatctttcaatcttcccacctcctcttctgcatggatccctgaggtttgagggaaggggtttgaaaaagacatcccatgtatgaaatcccatctgtgctgtaccagtaagtctcgaaggtgagtgctgttgtcggttgcagggtttgtagctgagttatattgatgatgacttgtctcaactgacaacacgcagagtatcttccacaacctttttcaatagaggggaatgaagcttctagttgagtgcttcaaaatctctcattctctgcatattgtccagttataggtttctgtgttaatgcaatctactgcaaaaagaaaattctttgatgagggttgagcaaggcatcgatctaagtataccagtatgtcattaggagtcattttattgttattttacattagcagaataatagtagaaagttttccccttaggatataggatccatgatctatgtagcctctggttcttagccactttagcagtttcagttacgggttccatctaatggagcaggatttaaatccaatttaaaacatgcttggttattcccataatatctgtggcacattgcaatatacctttaaggtgtgtgctattgtaggttgcaggttttgtagctaagtgacattgatgtttacctgttgcctctgacaacatgcagaacatcttccacaaccccagtcaatagaggtgaagcctctagtcgggcaccagcttgagttctctgtgttctgtgatgtcttcacaacagggccttgccatcagattgtggagagcaaccaatagacttggcaaaagcctgtgatgttttgtgggtccatggggccccttcagctaatgactcaacaaaatgtaacccattactggcattagagactctacttagtgacataagaagtctaattgggacattgtgttgccagttgttcgctaacccatttaaattcctttcttatatgtatatattgtaggaaagttctatagttgtagatttcaatatgatttttccaaacatctttatagcagttttccttcccaatattccctcctttactatgttctcttgtcccctttccaatttaatcttctttttctagttcccctttatctctctgtagcactacattctatcctcctttccttagtgggtcctttcctccctcccatctctttctaggtaccaaagctctgtggttgtttggattgtatcactcatatcaaaatcttaaaagctaacacccacatataagataaaagtttgtcttttagggtcttacatgtcccttccatgtccctcttctatctgcctcccctttcttcttcatcttcctctctttgtgtattagatgtgttcatctcctcttattgtctcatttctactttcacagcttgcacacacacacacacacacacacacacacaactttaaaatcaattttgtgtttgagaaaagaaacatactgtttgtctttctggatctgtcttaactcacttagtataatgatctccagctccatccatttttatacaaatgtataatcctattcttaatatctaagtaaaattctatgacatatgtatcatattttttcattcaactatagatgtatttctaggctggttctatatcttggctactgtgaatactgcagcagtagatgtacaagtatttctgtagtattctgtcttatattctttaagggatatacccaggaatgatgtaactgagtcatatggttctattttcattgttttagaaaaactctacacttattcataattatatgatgccataagtcacatcaggtaactttctctccaacaatgtgtaagggtttcctttctccaaatccttgctagattttatccaatattttcttgtatctttaatcaaaatttcaaccatatggaaatgttgcaggtatcacacaagagacccctgcacaaccttttcccagattcacaagttgtttacattttgtttcacttgcctcatcagctgacatctaaattatattagagtaagaaacattgtgttcctcattcctaaatatatcagtgtctgcttcctaagggaaaggaaattatcttatataacataatcaaaatttaaatatattaaggacattgtctcatcttaaacgctgtcaggaaacaaaataatatgtagagcttggtaatccacattacagcaggggactttggtaggtcagtggaagaattcaccctttaggccttttattctaaaaggaaaacaaatatatttagtacgctgtaaggagtgaagcaggcacagcaataagaagaaccaaatgggagatacggccctgggctacaggggtctccattctggagaagtcttcactcattgggctgaaccagtgtctgtatcccattcctggaaggatataacattactatgaaaatgaaggtgggtctgtaacatcaggttacagctaactatgttgacctcaccattctgatgttttgctattttgccagatagaactgtggtttttgtggggtggggtggggtggggcttattttttgtaacaagcttgtattgagaagctgttttactcctgctgtctgaataatggccttccttttgcacatgtcacagctccggtgcttcccttctgctctgaaaagaaccttgcttcttgtcttgttcccagtgaccttgttactgtatctttcagggaagacagaacaccagagccagagacccttgccctgccttacacctcattatctcccattctcccgcctgatcaagagcattgttctaaagcagctagcctctaggaagtgaccgattgcccaatacaaacacccatccctttcaaaaccctgcaatcttcatctctaattccttccatgacccaaataatcactcttactttgctttgatcatagctcatctatcttccctgataaaattgtaccttatccttcttctcattttgtgttttctcagacttacagagaagctaaagtacagtggctttttctagctactaaagagtaagttgcaaatacaggactcattgctctcaaatacttcattttccctacaaagacattctctgagaacacaaagtactcccccaaacaaaggaatgaacactgtaattccttactatcatataaacatcatctcataatcaaggttttccggagtgtgaccatctgaatcttagtcacggaagagtcaaattctgaattattcagactgaaactttgcatttactattttcttctcttgtcaatcaatctcagtctggaaaagggttcccttttgtttgtttgtttgtttgttgtttttcactacttggagacttccaaagattatatatcagtgattgacttaaatagcctcaaattttggattttctagagttttctcatggttacatttgggtttgtgtttgtgtttgtggataaggcaattctttctttgttgaatttttcctctttgttgttttcagtgctaagaatgaaagtcagggccttgagcatgctgggcagttcctctaccactgaactatactctcagtcttgcttttctttctttttaattgaaaatagatttttaatacaatatattctgattatggttttccatttcccctcctcccactcctcagacgtcctccccatatccctaccaatccaaatcacaccctttctttctctctcttccattaggatacaaacaggcatcaaaacaacaacaaaaaaaaaaacagccttgcttttctgctacagagtcttagtagatgaggcagtctggcttccaatttgccatgtcttgcctcagccttctgagtgttagaatgacatggacatgccagcttccaggcctctgaattaacctactttcaatgatgttcaatcactttattgaaagagtagaaaccaagattctctgtgtttttaatcacttatttgttattttggattgatagccttttgtacttcatcacgctttttattactcatttgccatattatagatttttaatatgttattttattcaatggcttgtaattactttcattatttatactgtcattcaaattctctcaaatttgctgcaggtggtgccctttaagttatctttggttcagttttgacgggtcttcattactataatcaaacgagaaacacaaatcaaagtcacggtggagtatcacccgtttgagtggctactttcaaaattaataaaaaaatggatgtatagaaattggaatccttgtacatattgatagaaatgtaaaataatgaagctgttaaaaaaacagcaaggcatttcaacaaaagcatttcaaatgctcactagccttggagggggggcacgtggactggaataaaacagtgtcttctgagaatgacaggactgccatactcatgaactgtcattgcctgtatagggctgcatagatcaatccagttgacactttatcatgggttggaaggggttcataagtccatgcccctaattgaggagatatgaacagtggagggagagtcagttttctttgtgggtgtggctcctggcagactctaccctagtagatagccctacacccagaagcataggcacatcacaaactggagctgataggatactaaacaaaaacaaaagagatcacaaattgggggaataatgaggtgggaaagatcttggtggagttaagtggtggtatttggtgtgaatttacccaacacccagaagtatactgacagcacaaattggatccaatgtgtattacattttttaaaaaatgttcttcaatttaaaagggaattcccacatgatctgagagttctatttctgggcctaccaaaagagttgaagtcaggatcttggaaggaccatagcaccacatattgtgaataacattgctgttattcacaatagccaagatatgaaaatattctcaatggtcctaaaagggtgaatgaataaagaaaatgttatctgtatgcacaatagaacagatgcaaagaagtagacaataactgatgttccctccacaggcgtgcagttctgattatatatgatgaatatattctaaatatctatgaacatcattctgccttagtaaacaatgcaatgctctattggctattaaaaagtatgtcaagtatacaaaccacaataaagaacaaatctctctctccctgattgaaagaaaatgccaatatatagttttctattactcaaatccccaaattatttactcaccctctagtatttatgaagcaaatttataggcagtagatgaaataaagaaaaagagaaaatactttaagagtttttacttggaagggtatttagatgaagtcatctaattgacatacattaatatcaaataactgatatacattaacaaaaggttgttgtgggaattcattcagtcaatagtctctgagccctgccctgaaggggctgatacctcaaagactattgactgacgaattcccacaacaaaaagatatatatatatatatatatatatatatatatatatatatatatattacatataaagacaaaataatgaaattactttaaaaaggtgacataacattaataatggttttaagcacttgctatttattcacagaagactggactaaaaatatttagtatgcatttaactattcaccagaatcctgcttcacatatgaggaacaataggttcaaaaggttgaatgttttatgaagcttgcatattgggaaaatgagaggatcataattggaacacagatttgtctgactccaaaacatttgcacttcatcaccatggcattctggagatggaaacaccccatcttagatcagaagacactccatgaagcagatggcatgtgagattgacttttaagaatcacccaagctttgaaatcagagatatgtctgaaaactattttagctataaagtgagtcaaagtacataaagggaaagccctgaggtgtgttaagaggacccacaagaaggagaaagaccaatagattgagagaaatagcaagagaggtgggaggaaatgaatggttatagatctcaggctactgagtctatatttgacgtaaggggcaaagtatagtctaagcagagttccaactctgtagacacctccctcagactttcagcaggatgacatcagttaagatctgaccagctctgatgattcataaaatgaatggcagttactaaacctgaggagaggaacccattcaagcagtttgggaagtggggtgaacagggaatgcagttcttgccagaaaagggaaagaaatgggagtgatcaaggagaatgtatccatggagacatgaagagcatttaactctgcagagaagagggattctcacaaagctcccagatgaacatcagtgagttgaccatttctaagtctgaagacagattacaggctcatcactgagaatgacaagatttgcctaaaggctactagcagtcccctgacccagaacattcctgtgaagctgggagtcctctttagacatttatggccaagctttgggttgatgggaaggctccgaagcaggtatactatataaaagctcatccaaagattattttagtgtggaaaaaattccttagacaggtttgattacagccagtcctttatgagaaaaatagggaatgtgtccatgtgggactatgtgctgttgctggaaaagatcatgtttacttatcagggtctacttcaaacccaataacatgaatttggtgttgaaatattagaggcaggattatctagtcaccatgacccataagtggggttgaagttgtactcaagtaggacaaaatttctgggaagaaaaatcactaataagatatacttactttgaagatgatactttgagccctgtagataaggcctgatgttttcttttaatttcccatttattgaattactggattcatagtaaaaaaaatacagtgtctcctaatatttgctcattacttttcattgtccagagcatctcttcagcagtcctgttttctaaagatagaatattgggtcttaaccaaaacaattgaagccaaagaaaccactggtaagggcttcagtcataataaaattcagggaagctagacattccagaaatggatgatggagcccactgccttttgggctacaaagctttcctaagtgctgaaggagaactatagtatgtgtttcttcaggtcctatcagcttcaccaccaagtgagaagagagaaggtagtgaatccatagtcagacaggtgtctggtgaagagagagtagagggtcagtcagaggtgtgtgtcctatcccttacctacatcagtctgagaactgtctaatcaaagtgaatttgaacttgatttatatcagagacctggaaattcagcttaacttataatttgtttctaggaagttctacagacctgagaggacttcacatagcagacaggatgaaagctaatatgcctgttataagagccaccaggtaagaaaaacaggaggacatcgagagcaatagaggacttttatgttagtcactttgtgtcactatgacaaaacaccaaaagcaggagtagtggtggaatgtaaggtagaaaggcttgattttaaccagctttggtgatttcagtacatggttggctggccccattactttgaggcttaagatgagatagaatattgtggcagcaagcacatcctggaacacgtaggtgattgcctcacgttggctggaaagcggagaaagacagaaggggtttcaagataaggcacatccttcagaggaatattcccaaggatatactaggaactcatccactaatgagtactaacccactaatgattccagcacctttatgatccagtcacttcttaatagtgccaccatctgtggttcaagcctttaatatgagcctttataggatacttcatatccaaaccacgtaatactctacatcttgtctccaaaaatcataacgtatcaattatcataatgaataatacatttagtctcaatagttctggcatttctcaaaaacccaaagcctcctctgcgactcaaggcaaacacaaagttaactgtgagttcctgtaaaatcaaatataaatataaacaattgcacaccataaatgttatcattctaaaaataaggactaggtcaaagaaaaagggtaggactaatgcaagacaaatcccatgaaagaaaacattaaatcttaccactctatgtctggaatcaggaggacttggtagaataatgtgagctcctaggaccttactgcctacaaaccacatggcctctctcttaggctggctcttctcactgcctttggtttttctttgtagatggcccacagtctcagcaatatctggtgtccattgtggcttgaattttgccctctcagcttcatacatcaccttctctagaaattgcccacagagaatccagactactaagtattgattgaatttctggttttcattttaaatccctgagggaacttccatgagcctgtgactatggcactccacatgactgcacaatcagcattgcatggacactggtcaagttctgcctcccgcttgaacttggatcacagttgtggtgagccccatgtgtctgagtacactgaaatgaattctgatggaacaacattctagtaagaagcaggatgtccaggagtcccctcttctacaaaacatctttcaaagaagtttccacttacacacagataaggtcttggcaattactgcaataccttcaagacatctttcctattgtctcagtgcattgtatgtttctctcgtcatttctttcctttcttaattttttatgtctgaagagatgaatattcttcaaaagcatacctctgttgaattacttcctctaagtattctctattttcagcaagctatgaattcaacaatggctcaatccattcgggaatatggggaaatgggagacagtaaccaattattccaaagatgatcttcagaaaggatgacttaaaaaaaccagttcatcacaggagagaaacatatgaacagttttatcagttgagaagtagtatatggagaagaccaaagagttgggagaccactcagccctataacagacactccctgctttaagctatggaaatacatgtaggaaagtatgactctaaagtattgtggctaaatggttttttacattcccatgtttcatgaaatataaaatttctttgaactggatcataaaacttaatactatataaccattttattcattcatttatctaatcaactagaatttatttcaatatttaccaggctccatactaggcacagaaatcatgaggctgagcaaaactaatgagtcctggtcaaaagagttttgaaactgaaacaaatataagtcaacattaagcaatggcctactgtttaaaagaatggcttattagttattattcctctccaatttttagttaatccaacaccctcccaagctctctttctagactagaggaaaaccttctttttcagaagtgttaaccatcattgggaatatttgtcactcaaagacatactgagcttttcctcatcaaatccatagtgttaactgaaatagagtgctggtgaccttcccagggtgcttcctataattgtcagatgcatcagcagtggtgtcaaatgaggggaaaatcttaactagggagagcactcatgccactaaaaatttattagtggaaaaaatcaaagatcttgacagaaattcaaagtcagagaccatgataatttctgggtcgtctggttatcctgatgtctatgaagaggtgggttatgatagacatagtccaagtcctagggtaaaagcccagcgagcagagcaagagtaaataaatgccttctgatggaaacaatgtgctgcactcagatctcccttcggtgttgctagtgatcataacaccaagcctctcatctgaccctctaccatattcatgaaggaactgaattggggttactcagagaagatccttctgtgcatcctactgagaaattttccagggcaaaatcacatgtggtgatattctaccccattccaccaaatctcacaagtttagagaaatttcatataggcccttaaatctatcgtctacattgagttaggaaggaaattactaactttggagtctaacagtcaactttttagatttttcaaagagatgtcacaacattgaactataaagagaaaacagacctgggtgacttaattcagtaacttgatgggtctcattggattataaattggcttctttcagtttcagagttttctattaacctcccaagttatataactaggacacaccacaaaaagttagtactatatttgtagtcaaaatgttcaaatagcaacaattctatatagtcccatctagtaggcaccctgagaaaccatctcacagtcagaacagtacaatatatctagagaaaagttatagctgtaggagtcagagtagacagataaggtgcagatgatatatttcaagaggagataaacccttccagtggaaacagactatgtttcattgatctctttctccagtgtagtcttttggatatcatcctccatggatagattggaggaaaggatggaaaggagaagggggagagatgacaatgaagttggtagagagagaaaaagggggacaaaggagaaaaaacggacggaagagtcataaaaagaaggaaagaggaagggcaggaatggaagagtgctatatcaatttataatggtgcccatgtctttattagtgtacattagttatatgtgatggatttcatcatgacactttcatacacatctataatataattctatcatttccccatgactctctcttgtttcccttcctcttttgcaattctttcctctcctcaactagatcctcttctagcttaatgttttttttttttaaataactcaatgagtttctttagagttgcttatgaaagtgtgtgtgaagggttgtttacaggaacttgagcattttccctgtggctttatcattatcactaaaggaaatgtctctcacggggctagagtcaaagctccactattaagagcactgactaagctgggcattggtggcacaagcctttaatcccagcactggggaggcagaggcaggcggatctctgtgagttcaatgccagcctggtctacacagtgagctccaagacagcctccaaagcaatacagagaaaccctatctcaaaaaaaaaaaaaaaaagaaataaataaaaagagcactgactgcttttccagaggactgaggttagattcccagcatccacaaggcagctcacaaccatctttaactttagtttcagggactgggtgctttcttctggcttccagggccacgccccgggcacacaactggtgtacagaaatacatataggcaaaatacctacacacataaaataataatgaacataaaatatttaaaaagaaaaaatgtctctctgatacacacatccatcaataactatatgaatcttaacagaagggtggggctccatgacaaaacatcaagcaacacaaatcttttatgtagataatcagagctgctgtgagttcagtgcagattttttagcttctaatacttaaattcagttagcatacagtaacaagattttattttctgcctcaaatagcatgaagttccgagtcaaaaattgctggtctccatctaaaacatgctggttcatagggtaaaaaatggcttcagcattatgttcacattcaatgaaggaagagggaagaggcaggaccagaaatttctgcctctcttttctttcagaacagaaaagcctgaagccctccttactctgtgaagaaatctatgataccttgctagccaaagctgtgctgcatgagcatttacatgagaaagatgctgaggtgatgccaatttcacaatagcagtgctaagtttctgagaaacacatttcagtcttcagtgaccagctctgtgactcttcagagctgttgggagtgagggagttgggtcctgggtttggttgctttctgtgttactgctgaaagatatctgccttctgcttcctgcgtttctgcatctctttaaagggaatgctacaggtccccagtggggtccggatccctctcccctctaacatttacagagacagagcaccctggtgggccaattcaacaatcttgttctctgagttattcttgaagaaacagcctatagcctgctcctgcaggccttggtggttttgcaaacacttaattacatctttcaaatgtctttctgtttacaacagctagcatggtttttgctttctgaaccaaggctctagctggtgcacaagccagtgttttgccacaggtagtcaggtggaaagcaagctctgcagggcctcagcctctgcccaggcttgtcaagaaaaaaactaacaagaactaatttcctcagcttccccgagctcgcacaagtgaacacatatttacttcccaggcacagctttagtcacacagatctgaacctttggaagtgtccatgcttctgacattactgctctcctgaacaaatgacacttgttgtgcatcctaaggtttcagtgtcctgctctctttagttttctttccattgaacaaaatgatttcaagaatcatacttggatgcatgaatgcatctcagggtattcattttccaggatttataatcatttttggaagctctatgtctacagaaacacagtgtgcttgatatttgtgagtttctcctctcatagtcacctttgatgggcagagacagcaatagtagatagatagatatacagagatgccttcctgcaactacattttggctagggtcagttgtgtatgggccatgacacaaggacttgagccccaataccaccagaaaagaagctcatctttggggcaaagagatgtgtacactcaccactgtgtgcccagaaccttgaacaacaactgagatgtggtagctggctgtcaaatatcctctgaattaattaatgttcactgacacatcagtgaacactccccacataggtgccattagcatttagtcatcaagacaagtcagtgaagttgatgctctcttcactcttctctatgagtatgttagccctttttttctagacagtttgactggtggaactgctgagttaaactctggattcactgacttgcagaaatccaacagttacttatgggaaagggagtaaagatatcagctatcaaagtgggctagtacttttcttaggttcaggtcagatctctgtgtctttccttcgcatgggtatagaatgtaccacaccaagttctttttcagtgtggcctctctgtaccatcttttagagtttcctgaagaaaaagagggagggagagagggaaggaggagagagagagggaggagatagggaggagggagggagggagagaaggaggacaagaaagtgataaaaagggcttgagtaagcgcgtttgtcactaaacctatgacttgatttggatttccacaacccacatagtggaaggagagaactaactcctataaactctcctctgaccttcacacacaggccagagtgggcacacatccacacacactgaataaacaaataatgtagaaaaaaagaagaaatgcacaaggtttcctctaaattggctccgtataaaagtgtaacagcactgaaggaagttaacactgtgacttatctaggactcatttctggactaaagctcctttcaaaggttagtatctaaccttagtggtaaagtcttaaattccatttctaacacagcattgtattatttgacacgaactatcaacagattaaagaagtgagtcacccaaagcaattatccaacatgacaaccacagccaattcttaaatagtactaaaattataatgagatgaacaaaattacaatattcaagaaagtatacttcaattagatgggctttagatatcaactgggtgggtgtatgtgtgtgtgtgtttgtgtgcatgcatgcatgtgtaatattttaggagaaccccgttgccaaagaacatgcttaagtcataatagatattctctaaataccttagtagtccttgttagttatttttcttgttgctgtaacaaaacacccaacagaagtaatttaaggagaagggatctactatagctcaggatttgagataacacagtccatcataacagaaagaacacattagttgagagaagattcaacgatagtgagggcatcagacagctgttttctcacatataagtggaacaggaaggacatagtgggacatgtcagcacttgagggctgcctctcttccttttcagcctgggcctctaaatcataggatgttgttattcacatcagggtaggtcttctccctcagttaatctaccctggaagtaccctcataaacatactcaaaagtgtgtttcattaattcttcaagcaagttgatgatgttcaaaattacccattacatagtctaacacacaaatagttctaattttacacattttaaaaattagctatgtgactttctccatcattttccatgtgaacatgctataattacccaaagtttgatgggcattggtagatcaacgtcaaagaaggcagtcataagattggcagataccttagttgtttgctaaatcgtggcataaatttttagctccttaccaggtcctggtatcctcacaccaagagggattccagggcctgtgaaaaagtgagcaggaatctgcagtgcttcctattacttgtttctgacatcacactataacacttccactttttcctactcattaaaagtgattcatcaagtccaggccacactcaagggatgaaacaggccttataatcataagtggacaatgcttaggaccatcactgaggcacactttcaatttacccttccctccccagcaacaactcatttccttctgtataactatgcaatggccatttttaaatactccctgagtcagacatgttagcacatacctgtaatcctagcacgcaggaagcagaggcaggatgagcactgccaagttaaaaggtagcctagactacacagtgaattccaggccagaaagagctatgtagttagaccttatatttttaaagtccccatgttttaaaacaaagcatacaaagatcagtaaataattaatgcttcccccaaaaaagtaccaagccctgattgttttacacatgattttaataaaacaagtatttcacaaaaagaatgtactgatgattgcctgcaatctgttccagataatagagaaaaaacattccccttccaatctttgaatgtacctaaccctaataccaaattcatattggaacatcataagagagaaacatgaaagaacaatttgtctaatacatacatacatatgtatattcaggagaaagaagtatgtgacttagaaggaattattatctttgctactgtgacatgtgacactgtgtatttgtcagaactcttagaagtatgagacacaaagaaggcatcctgatgtggaaatgctcttcacgtattgataacatgatagagtaatgcaaggaactgatagtaggaaactctgtgccatcagatcagtttgtgaaataaaaacctctccacaaatacatcttagtaactctcaaaactatatcatcagttaataaagttctaagtgcattactaaaatctgcatggtctatcttactggagaatgtccaaacctgcagcagctatatgactactcctcctgactcctctttgcctcccctccccggcattctccttgtctggtctccccacctatacttcctgcctggatactggacgatcaatgttttattcatcaaccaataagagaaacagatatacagaaggacattcccgcatcatgtacctcccccaactcagtcttcttgatcccttagggtcccaccctccatcccctcccttctacccatcccagcttacccaggagatcttaactctttccccttcctagggtccccttacagtccccttgttacctagcttctctggggttgtggaccgtagcctggttatcctttgctttatatctaatatccacttatgagtgaatgcataccatgtttgcctttctgggtctggtttacctcactcagagtgtttttgttctagttccatctatttgcctgcaaatttcaagatgtcattggttttcaccgctgagtaatactccattttatatgtttccatgttccaaatattatactggattccatatgtaaaattgactcacccaaactctgaagcagagctaagtgtatagctcaggggtgaagcaccctcctagcatgagcaaggtcttggtttccaccagctgatcgacaaacaaaaccatcttttcagtgtcacaagcatttaatggatatatactacagttattagaagatagcagataagcacttagatgctgagaatttatatacctgtggaggggatcacttggaaatggcaggcatagaacagaggtcagcaatctagggtaactctccatgggcttcatctctaccatacactgacaactggaaaattgtaataaaatatcttatattcagaaacaataaagcattgcacctaccatttgataaccccccatttgaaatctgaatggtgacttatccccttccctggactctccatcatagactccagcaaccactcttgctgtccaagaactgcaacactgtcttccagttgaagcgtctgtggtgtgcattcactgaaagtcatgaatgccattgtcctgaaggcattaaatgcagcagtcataaatatgaagtaacatttctttttttgttttgttttggtttggtttggtttttcgagacagggtttctctgtggctttggaggctgtcctggaactagctcttgtagaccaggctggtctcaaactcacagagatccgcttgcttctgcctcccgagtactgggattaaaggtgtgcgccaccaacgcccggcatgaagtaacatttcttattgtttatccctgttactgtaacctcacaacacagggatggccatgagaaagtggtgctctggatataccaaacagcacagtgagccagtagactcttaactgtgactgctcacagtgtttggtttgtgtacaatgttgcatccaaattcccaccctcagctgtccacagttctgcttcaatctttcttttttccaaaaaaaaaaaaaacctcgccaggcgttggtgccgcacgcccagcacttgagaggcagaggcagaagggtctctgtgagttcgaggccagcctggtttccagaggaagtgccaggataggctctaaagctacaaagctacacagagaaaccctgtctagagaaaccctgtctcgaaaaaccaaaacccagtacctgatctgactttttagtttctagaaggtcagtctacctacttcagatttgctattcctatcctacttaggaagctctctctctctctctctctctctctctctctctctctctctgtgtgtgtgtgtgtgtgtgtgtgtgtgtgtgtgtgtgtgtgtgtctgtctgtctgcctgtctgtctgtctatctcctgtcctctcttctccaagacagagatccccttcctgaccaagataactctccttgcagccagcagaatatcccaaaacaaggtgcttgtttttagcaccttctagagcaaagaataaaagtttccatcaatgaaaatgaggggtaatggtctcttcactgtagctggagtttttatgtgtcccacccagtcccacaaccatttataaaatattcattcagagacttaatattaattataattgtttgactaatggctcaggcttcttattggctatatcttacatttaaattaacccatttctaatcatctgtatattggcacatgccttgtggcttaccagtaatgttctgatatcttactcctctggaggctacatggcgtctcctcgactccacattcttcctgtccttatctctgtttggatttcctgcctagctatattctgcctgggtattggccaaatcagcttctttattaaccaatggtaataaaacatattcagaacatacagaggggcatcccacatcactttacaaggtacaagatgtagtaaatagaattttcctaccattcattttaaaaacaaaaatcattattatccaccttatcatttagtaggatagagaatcagatttttgtgccagaagcatggggctagtccttcaacaatttaagaagtaacctcctggcccagaattacactttccagacccttttcttttaagcatagacccagggattgttcctaccaaaagtatgtgtgcagaaataccatgcacaacttccaggccaccatggtaaaccccaggggagtttttcatgattgccttttgcttgtcttcacctgcaggcagagccttcctcagaaggctgtgaagctctggaaatagcagagccatatgatgcaagatccttgaaatgtgacttggaggagagcctcctgacaatcaggaacatgcaattgtattttaaacaagacaaaaataatttctcatgatgttaagtcatgagatgtttttatagattattactttaaccattctgaatacttgtgctgtttctcttcatttttggtttgttcttagccttttggcaaagtaaagttgcctaaaaacagatctaccacacaagatagatgattggtaagtatgtatattggttagttttgccaacttaaaaagattataattacctggaaagacagaatctcagtatcctcaattgtttccatcagatttttcagtattcatatctgtgaggtatttctttaactgttagttgatggagagggcacagccacttcgggtgttactatctgtaggcaggtgacctttagctatatttaaaagaaaaaaaaaggtagctgaagcaagctagagcaaatcagtaagtcacattcttccacggtttctgcatcagttcctaccttcaggttttgcttgtgttcctgccatgacttctcttaataatgaagtatgacatggaaatacaaagccaagtaggccctttcctacccaagtttgtttgatgtttatcacagcaacacaaagcaaatcaacacaaagcaaatgctgagcaaatacaaaattctcagagttctcaaatatattacatctccagaaaccttttaatttaaatgcccattcaactagaaggcaaacttataaagattgcagtatcaaaataatagtatctattttgaaaccctcaggtctttttcttcctgtcccccgaccacaccatctgatctgtttctgctgctactgcgaggtactacctttggaaagccatggttgttcccccaaagaaaattttgcttattaaactgcctgtaatcccccacttagttctattagcagacaaatcaacctgattgattctgtctcagaactgccttgatccccaccatttggttatccccaccaaaatttgagatcagcctcttttctcttcacctatagattttgataaagaaaatggacttgaagaacacaaaagtagaagaagcaccatgacatattctaggaacaagcctgaaataactgaaggaggaagaaacttcaaagttgtagcacagcttcttatgtactgaccttgacttttcttatactgactctagttagccattttatgtctggtttctcacttctcttgtacattccactacctcaaaaacattctcctataccaacaagtatgaagtccaatatgtattatgtggtataaagtactctgttatattgcaattattaaacattgttagtatacatatcagtttctgattctctgtagacactatcttcggtgtctattcttcctctgtcaaaagacaagttttattcatattttcaaatccaggaaaaatgttgcttcttgaaacctccaatcactcttcatatctatctatactgatggttattaccctttgttaactgcatttccaaaattctgtgattactatctgcataacactggcctattggggaaaataactagattactgtctctctaagaagtactagggagacattgtttctgtatttctagtgctagcccccagcacctgacactgaaatagtgaatgtgatatttttattgaaacaagtcaatatactacaaaggctttagcaaaatcacaaaatgaaacacaaaagctcggggaatggcaaggcaagcagctcagcaaaagaaaaatctcttgaataaacatttcttcaactggaaaaattattaatgacaattattccaagcttctggaggttgccaagagtacttgtagtgtttttttttttaaatcaaactctctaaatgcttaaataaggacaaatttggggaaaacagaaaactgtgacattttgcatagttctgtacccacccctctcccactccactctgcattatagaagacctattgctggtggaaatgacagcaggagaaacagatttcttctccatcagcttagttgtgcatccaacctaatcaagtagagtagaagtcatgcatatccccactcagttcctgcaccacaggaaatttcgcatgtgccagttaatggagagcaaactccattcctaccacccttatttccagctccatacaataagcaggcattccctatgaacacaccagttgagtaggctagtaaaataggcaacacacagccaatacacttctaaaatccaaggaaacagaaaccaaagaacaaaacacctgcccaactaagacaaacccagaaacctgcagccagacctataatcaccccaaacccatcatagatgccagcataagaacacaatcaataacagccaggataatgtctccattagagccctaccacaacaggcccttattataaaaacatagctgaagcgtaagacaaagaccttaaaaccacctacttgaagatgatagaggtacttaaagaggaaatgaattaatcctttaaagaaagtcaagaaaaaccaaaataaagtgtaatgaaatgaatagaagtgttcaagaactgaaaatggaaatataagcaataaaaacacacactaggggaattctgtaaataaaaaaaaatgtaggaatttgaacagaacctacagaggcaagatttaccaataaaatgcaagagttagaagagataatatcaaacattaaagatatgatagcctaaaaattttttaaaaagaaaattttcctaacctaaaggagatgcctgaaaaggcacaagaaatataaagaacaccaaatagattagactaaaaagaaattaccccaccacataataatcaaaacactaaacataaagaacaaagaaagaatattaaaagctacaatggaaaaagattaagtaacatacaaaggtcagcttactagaattacatctgacttctcaatggagactaaaaaccagaatgacctacacatatggactgcagactcttagattccacagatgcaagcctagactactgtaccagcaaaacttttgatcaccatagatggagaaaaaaggatattccctgatttaaacttatctatctacaaatccagccctacagaaggttctagaaggaaaactccagcaaaaccaaaggaaagaatcacacacacacataacaaaaacaataccgaaataacaggaatcaacaatcattgaccattggtatctctcaacatcagtgctctaaattccccgaaaaggatacatactaacagaatgtacacaaatacaggatccatccttctgctgcacccaagaaatacacttgaacatcaaggataaacattaccttagggtaaaagtctgaaaaaaatattccaagcaaatggatctgagaagcaagctggtgtagccatcttaatatctaacataatagctttcaaaacaaaactaaacaaaagagatagggatggatacttcatactcatcaaaggaaagatccaccaagatgatatttcagttcttaacatatatgcctcaaacacaaggcacccacccttgtaaaagaaacactactacagcttaaatcacatattgaccctcacactgcgggagacttcactacccaactcccagcaatggacagatcattcagacaaaaactaaacagagaaatggacattataaaaccaaaatgaacctaacagatattcacagaatattctacccaaacacaaacgaatatgccttcctctaagaaactcatggaactttctccaaaatttaccacataattagccacaaagcaactctccagatatacaaggaaattgaaataattccccacatcctatcatattacaatggattaaaactggacaccaacaaaaaacacaaacaacaaaaaacctacaatttcatagaaattgagcaactctctaccaaatgaaaaaattgatcaagacagaaataaagaaataaattaaagactttctagaattcagttaaaatggagtagatggcgagggattaaactgagagctgaaatcaataaaatagaaacaaagagaagaattcatagagtcaatgcaacaaagagtttgttctttgaaaaacacaagatagacaaatacttatcctaaccaatcaagagactgagagaaactatccaaattaacaaaatcagaaacaaaagtgggcatatagcaacagacactgaggaatccagagaatcataagcatacaccttaaaaacctgaaatccaccactctgggaaatataaaagaaaaatggattttttcaataaatcaagagcaggtaaatagtttaaatagatactaacaaaaagttataggccaatctcactaatgaatgtagtagatgcaaaaattatcaacaagttctacgaaccaagttcaagaactcatcaaaaatatcgtctgccatgttcaaattggcttcataccagaaatacaaggatcgtttaacatatgtaaatcaataaatgtaatccacaacataaacacattgaaggacagaagccataccatcatcttattagatgtagaaaggccatcaacaaaatccaacattccttcataataaaagtcctatatagctgatatatccatttcaacataagaaagggaaaatatagcaagatcacagcaaatacctgctaaatacctgctaatacatgctaaatggagggaggaagcattttcactaaaatcaggaacaagaaaagtttgttctcaccctccattcctgtttagtgtttgaagtcttagctagaacaatcaggcaaatgagggagatgaaggaaatataaataggaaaagaagtcaaagtacgttaatttgtagactttctgattctatatgcaaaaacaccataaaaactgccaggaaattcctaaagttgataaacacattcaagttggatacaaaatcaatatacatgaagggccagaaagatttaagaaccagaggaccaggacatctgctatgagacagtgccttctatatgtgataggcatgatacactcatgaaatttgaacaatatggttggttgcctaaataaggtatacacaatgacattagttggcatgcccaacatgagtctgatgaatctcacaaagctccatctctagatgagaaaccactttgagatcttcctacctctcccttttactccaatacaatattccaataaagacagttggtgaatggtcaaaaaatagtcttcctatatacatacataataagagaaatcaaagaaacaatcccattcacaatagcttcaagaaaaggttaaaatgtctagggataaatctaaccaaggaggtgatttgtacaacaaatttaagatgctaaaagaagaaattgcataatatgctagaagacaaaaagagctctcatgctctggtagcattcagacgatgatatggccatccttctgaaagcaatccacaaattcaatgcaatcttccataaactcatgaggtaattaatcacagaaagtaaaaaattaatcttagcttccttccccctcctctgccaacctgacccctaccaaggagagtgtaccctctgctcctgccctactcctacccaatatcccattcaccccgatctctctgggcctgcatctgcttatagtggacccacccagaaagggaggagctccctgagtctggaaacacctcactcttcgttccccttttgctggcttgacccctaccaagcctgatgcctaccaagtgagcagactaccaggagaggcaagaccatccagagctgcagacattgaagtcttggaccacacacaccaccgggtgacaagaggagatacagagaccccacttgcacccactggaagaagagatgggaagaagacaaaatatgaacacactcaacaacagaaaggccaatatgacaccaccagaatctaaagactccacaccagcaagaggtgaaaagctcaacacagaggatgaaaaagacatggaactcaaaaattatcttaggaagatgatagagacctttaaagaggaaacaagaaaatcccttaaataaatagaagaaaacaagcaaaaaattacatgaaatggaggaaaaggaaaactaaaaaattcaagaaataaacaaatctcttaaagaatctaaagcaaaccaagaaaaaacaaccaaacaagtgaaggaagcacttgaaacagttcaaggcatgaaaaatgaaatagaaaaaataaagaaaacacagaatgaggggatgctggaaatacaaaggctggataaacaatcaggaactaaagatgtgagtataaccaatagaatcaagagatggaagagtgaacctcagttggtgaagactcgctagaggatatacagtcatcgaccaaagaaaatctcaagtccaacaaatccctaacacaaaatacccaagaaatatgggataccgtgaaaagaccaaacctaagaatagtagttatagaagaaggggaagaaatacagctcaaaggtacagaaaacatattcaacaatatcatagaagaaaacttccccaaactacagaaggatatgcctatgaaagtacaagaagcttacagaacaccaaacagactggaccacataaagaagtcccctcaacacataataatcaaaacaccaaacttacagaataaagagaaaatattaagaccacagaggaaaaaggccaactaacatataaaggcagacctatcagaatcacacccaacttctcaatggaaactttgaaagccagaaggtcctgcatagatatcctacaaacactaagggagcatggatgccaacccagactactgtacccagcaaaactttcaatcaccatagatggagaaaacaagatattccatgacaaaaccatacttaaacaatacatatccacaaatccagcactacagaaagttctgaaaggaaaactccaacccaatgaagataactacactcacaaaaaacataggcaatagataatccaattttaccaaaatgaaaagaaacaagaaggcgaaaaccacacacaatgatagcaccaccaataaattcaaaacaagaagaatcaacattcaatggacattaatatccctcaatgtcaatggtcttaacctgcctataaaaagatacaggctaacagaatgaatatgaagacaaaatccatccttctgctgattacaagaaacacacctcaacttcaaagacaggggttacctcagagtaaagggttgggaaaagattttccaatcaaaggggcccaagaaacaagctggtgtagcaatcctaatatctaacaaattagacttcaaagtaaaatcaatcaaaagagatgaagaagggcatttcatactcatcacaggaaaagtccatcaagatgaaatctcaatcctgaacatctatgccccaaataggaaggcacccacatatgtaaaagaaacattactaaagctcaagccacacataaaaccacacacacctatagtaggagatttcaacaccctgctttcaccactagacaggaccaccagacagaaacttaaaaaagaaacaaaggatctaacagaagttatgacccaactgggtttaacagatatctacagaacattccatcgaatacaaaagaatataccttcttctcagggccacatggaaccttctcacatattgaacacttatttggcaacaaagcaaacctccacatgtacaaaagaattgaaataaccccctgtatcttatcacatcaccatgctttaaagctagaattcaacagcaatacaaattgcagaaaacctgcaaactcatggaaattgaataacacccaattgcaccattcctgggttgaggaagaaataaaaaaagaaattaaagacttcctaaaatttaatgagaatgcagacacaacatacctaaacttatgagacactctgaaagcagtgctaagaggaaagttcatagcactaagtgtccccatgaagaaactggagaatagtcacacgagagaattgacagaacaactgaaaattttagaggaaaaagaagcaaactcaccacagaggagtagacaccaggaaataatcaaactgagggctgaaatcaataaaatagaaactaggaaaacattacaaagaatcaatgaaacaaagagttggttctttgagatcaacaagatagacaaacctctacccaaactaaccaaaagacagagtgagagagcacgctaattaacaaaatcagaaatgaaaagggggatataacaacagacactgaggaaagccagagaatcatcaggtcatactttgaaagcctgtactccacaaaatttgaaaatctaaaggaaatggacggtttcctggatagatatcactttccaaaattaaaccaagaacagataaacagttcaaatcaacctataacccctaatgaaatagaagcagtcatcaaacatctcctaaccaaacaaagcccagggccacatggcttcaatgcagaattctactagaaattcaaacaagagctgataccagtactccttaaattgttccacacaatagaagcagaagggacattgaaaaactctttttatgaggctacaatcactttgatacccaagatacataaagatacaactaaaaaagagaactacagaccactatccctcatgaatatcaatgcaaaaatactcaactaaatattggcaaatcaaatctaagaacacatcagaaaaatcatccactatgatcaagtaggcttcatcccagggatgcaaggatggttcaacatatgaaaatccatcaatgtaatccaccatataacaaactgaaaaagaaaaaccacatgatcatttcactagatgctgaaaaggccttgacaaaatccaacatcccttcatgatagagatcttggatagaacaggaataacaggaacatatctaaacatgataagagcaatatacaccaaagcaacagccaacatcaaaccaaatggagagaaagtcaaattgattcctctaaaatctggaacaagtcaaggctgtccactctctccatatcgcttcaatattgtacttgaagttctagctggagcactaagacaagaaaacgagttcaaagggatacaaattggaaagaatgaagtcaaactttcactatttgcagatgatatgatagtctacataagtgaccccaaaaactctaccagggaactcctacagctgataaacaccttcaggaaagtagcaggatacaaaattaactcaaaaaatcagtagccctactatatacagatgataaatgcaatgagaaagaaatcagagaaaggtcacccttcacaatatccacaagcaacataaaatatcttggggtaacactaaccaaaaaagtgaaagacctgtacagtaaaaactttgagtctttaaagaaagaaattaaagaagataccagaaaatggaaagatctcccatgctcttggataggtagaatcaacatagtaaaaatggccatcttgccaaaagtaatctacagattcaacacaatttgccccatcaaaatcccaacacagttcttcacagaacttgaaagaacaatactcaactctatatggaaaaacaaaaaggatcttctggaggcatcaccatccctgacttcaagctctattatagagccatagttctgaaaacagcttggtattgacacaaaaatagacagataaacaatggaatcgaattgaaaaccctgatatttacccacaagtgtataaacacctgatctttgacaaagaagtgaaatctatacaatggaaaaaagaaagcatcttcaacaaatggtgctggcacaactggattcggacatacagatgattgcagatagaaccatatctgtcaccatgaacaaaacttaagtacaaatggatcaaagatctaaatccagccacactgaatcttttagaagagaaagtgggagatacccttgaacgaactggtacaggagactgcttcctgaacattacaccagtagcacagatattgagatccacagttaataaatgtgacctcctaaaactgagaagcttctgtaaggcaaaggacacagtctgtaagacaaaacgacaacccacagaatgggaaaagatcaccatccccatatctgacagagggctgatttccaaaatatacaatgaactcaagaagctagccaccaaaacaccaaacaatgaaattaaaaattggggtgcagaactaaataaagaattctcaacagaggaatctaaaatggctgaaagacacttaagaaagtgctgaaaatgcgtggccatcagagaaatacaatgcaaaacaactctgaaataccatcttacaccagccagaatggttgaaatcaaaaagaccaatgacaatctacgctgaggaggatgtggagaaaaaggaacactcctccattgctggttggagtgcaaacttataagaccactttggaaatcagtatggctgttgctcagaaaaatgggaatcagtccacctcaagatcctctcctgggcatatacccaaataatgcaggttcatacagcaaagacatatgttcaaccatgttcatagcagcattgtttgtaatagccaggacctggaagcaacctcgatgccccgcaactgaagaatggatagagaaaatgtggtacatttatacaatggagtactactgagcagaaaaaaagcaatggaatcttgaaattcgcaggcaaatggatggaactagaagaaaccatcctgagtgaggtaacccagttacaaaaagacaaacatggtatgtactcactcatatatgaattttagatatagagcaaaggattactagcctacaatcctcttcaccaaaggaactaggaaacaagagggactctaggagaaaaatgcatggaccctggagagtgggaaggggcaggatctcctgaactaattgggggcatgagggtaggggagagggagctaccagaatgagaggaggagaagcggagggaagaagagaaaattgaggagcagaaatgttgagtttggggaagaatagaggagaacaggatgagagataccgtatcagagggagccattttaggtccgaggagagatctggcactagggagatatccagagatctacatggatgacacaaactgacaatctaggcaatggtggagaggataacctaaatgccctttccctatatggagactgatgattattttatataccatcctagagccctcatccagtggctgatggaagaagaggcagacacccacagatatacactgaactgaactctggaacctagttgcacagagggaggaatgaatatcaaaggggtcagtaccaggctggtgaaatccacagaaacatctggcctgaacaagggggagcacatcaaccccagactgttgtctgggagaccagcatgggactgatccagacccctgaacatggatgtcaatgaggaggcctccgcactctatggggcccctggtagtagatcagcatttttccctagtgtaagaagggactttgagagcccatcccacttgaagggatgctctccaggcctggacacatgggggagggtctaggcccagcccaggatgatgtggagcccccatcaagggccctaccctgccaggggagtggaggggccataggatgggggcaagtaggtggttggggggagagttggaggaggggagggagaagggattgacatgtgaagcttattcctaatttgaactaataaaaatatgaaaaatttaatcttaaatttcatatgcaaaactagaagacccagaatgttaagataatcctgaataatataaacactactggagatcacactatccctagtttcaagtaatattgcagagctctgctaatataaacagcatgatactagcctaaaaacatacagtgatcaagaatggaggatgcacatataagcccacattcttacagccatctgattttttacaaagaggccaaaaatacacatgagaaaagatagcatcttcaacaaatgttcgaacttggtagttatttatagactagaactagatccttattaataacccacataaaactcacttataaatagatcaaggacctcaacataagacccaactccctgagtctgttagagaaaaagtagggaatacactccaacgtatagacacaggaagagactttctaaacaggactccatcagcacaagcattaggatcaagaaatgaaaactggggtctcatctaactagaaagctgttggacagtaaaggatgccatcattagagtgaagaggcagcctgaatcatgggaaaaaaactttaccagccatacatctgatagaaggttggtgtctaggatacataaggaattgaaataaaactaaacatcaagaaaacaaacaactcaatttaaaattggggtatggaaataaacagagttctcaacagatgaaacacaaataactaagaggtttttttttttcaatgttcaacattattagccatcagagaaatgcaaattgaaactactttgagatttcatattgccctagtctgaaccgctgagattaaataaaatgacaacaaatgctggggtgcatgtgaggtaaagggaacacttagtcacagctagtgggcatgcaaactggtatagcctctatggaaatcatgatggaagtttctcaaaggctaaaactagatctacaatacaacccagctacactattttttgaacatttacccaatggattaggtatgctattatggagatactggctcatccatgttcatttttgctctacacatgataaccaggaaatagaaaccacttatatgcctatcaactgataaatgatgatgaaaatgtgcattgcagaatgtaatattattcagctattaagaaaaagaactttgtatgtaaatggatggtgctggaaatagtcattctgattgtggtaacccagacccagaaagacaaatatacatgatttctctcatatgtaggtgctaggtttgagtcttttgatatgtgcatccatgttaatgcacccatagaagacaggagattaataagggtcatggggtgatttgaggaaggaaagatccaatgcagatggtatgaagaaagactggagaataccagaagacaaaagattctgtgagatgaggaatagggatacgggtagaaggggaagtatgagatggcggtaactagcaccaaatacctgtagaaatgctgtgtgaaaccctactagtatagaagactcctaaaatatatacacatacaggtattaaaagaggtttaaatggaattactatataacagggggagacaggaggaagaatggtttacctggatatcataagttatcaaatagagagtccagttccaggaataggctacctttttttttttacttgtttgtcagcaggttcccatatactcccaaacattataggctattgtcatcgttcttgattaccctccagaacttgatggtgagactttattactgaagataccacatacttgagtcagaacttagagaaatcatgctggtaccaaacaagcttcatccctactggctgactctcagagtgctaaaaactgttatacaggatatataaaaagaaacgtaaccatccccacactacccagctgtgaaccaatatgaactacaatgaccagtctggactcctaatgatccctatattctaatagtctatttcactaagattgcatcaatgggttccactgataaattagtcccctcatgatccactgccctttcaatagtgtcatcagtagggcatcgaatctttaacacctgagctatttggagtgacacttcatattcaaatcagcaacttataggtaaatatgcaagggtgaaatattaaaggtactattgaagtactatagaataagagatggagtgaccagttttgcctgaatgaggtagagaatagacaaggagaaagtaactgatgtcattgctgctgctgctactactagtgatgatgatgatgatgatgatgatggcgactgtaatgataaagagcagagagaaaaagaaagaaaagaagtaatgggaaacaaaagaggaagaagaagaaaaaaagagaatgaggaggaagaaaagggaaagagtactaccattatcatcacctgtggagctgaaccacttcaaatctattttacaccactgtctcctctactcacttctattcagtctcatagactagttgtcatttctcagccactccagaaattttctttgcattgttttattatcattttggtttaaatatgtgtagatatgtatgagtatgtgtgtaaacaacattgaaatatgaaatttacttcctactgtgaatttttgacaaaactgtgttgcaaaaccctattacagagcaatagatatgtgactttggtaaatcagagaattctttgaaaaatctgattctgaaattggagaatacacagatggtgcctgaaattgcagtattttctgtccaggttcagaaaaaattctcaaaaggtaaaatgagttccaaaatccactaggagcctaatataaaaagtatactggaaattgatcctcactgagacattgacatcttctattgatgccccattctgacaagtaagagaactccagaaggagatgcccctgttcctatgacctttaacctctaatagcctattgacgagaaataaaaacataggtggccaaatcctgtgtctcaccataaacataaaagcaaaaaggaaaaagaattgacatgaggctaaaatagctcaaatgtccccaaaccatacaagtgactatcagaatatatctcccaattccatctcacactggacatacccaaaatttgtcttaatcacatgaataatgaccaacttgggaaaaaataagataaaggcatagaggagctttttgaaaaatatgtgtccaaaaagaggacacatgattaaaaacaaacttttgacctctccctcccactccattccaactaacccatcagagaagacaacaggacatttaagatatttgagtcattgaaaattatagttggcatttatagtggtgcactcaatgctatttgcacacaattagccactgctgacccaaacatttactgctcttccatggaatggtcattctcaaaagctttccaaagagaaaagaacacctgagacgaaggtgtcacttcctgaaagaagctctcatctgatcttcattgtagccatatcgagactacaaaaataatgtggttttaaaaagattggtttcttctgacattagtaaagtgtcctccacctaaatacacaccatctgagtggtcagccaggatgagtccctggaaacaagagcctttcttggctgaaagtctttattttttcaaccatcaaatggtaagtaacactttttgaaatgcccattaaggatcaaataatggaactgagaggctcacattgtccctgggattccttaactgaagttactcctgccatcatcaccacgaggctagcaccactcaaagaccaaagtcaagtgctgaaaggccaggtgaaataagagtcagaaaaaccttcaatcacaatgcttgcccataagaataagtcatcaaagaacttctcaagagctgctgcacagtggcaatgagctgcagagtagaaatcctagcttctgccctcttgggggcactcaaggagaacagcctaagtgcttcagtcaatttacagcaaagctctctattttgtccacttgtgagataaaaaatgttggtgagcaggaaaaacattgccctagactaaaggtctcctgatgaaatgagtaaatctattaagcaatcctctgtccacagctatgtgagtgtctatgtatgtggcctctgtgtacctgagtcagtaaacaaaagggaactaccagtgagtggtgatcacgtaggccctggatagaaggcttcttttatttttaatttatctatttgggcttacatgagtcaataatggcataactgtgcaagacaagaacttttgaaagatggagggatagacacaaaatgatgaaatcctcaacattatgatgacaatggttgttgatataagaaatgtaaactaagcctatgaacttatatgcagtgaatagatttttttatttcaagggtaatactaatacagaaaagcttcataataggatgacacaatagtgggtcgctactgtgcagaaatgttaatggagcacagatgttctgtgggctgctgttatgtatgatgatatattgtttatgatttaataaagcctcactggagatcaaaatataaagctagctacagccattgagccaggcagtggtgatacacacatttaatcccaggactcttgagacagacagacagatctctgttagctcaagaccacactgagatatatgaaatccatccagtctaaaacagatacagctcacgcaaaggttatctcggcacttgggatcacatgcctttaatcccagcacctgggaggcagaatcaggtggatctctgtaagtccaaaactatcctgggttacacaagagtgaatcagagcttacacctttaatcctaggatttgagaattatttttttaaaaagaagcaaagggtctcatatgggatttagtttctagacagggaaggcataggattgcagtctgagaagagaagtgtagcttggagatgcaatcagaggacacaatcacctcttctgtctgagcattggtagaggtaagaaatctctatgacttggctgcttttttctatgattttcaggttgaagcttgaagcttgaaccccaatatctatctctggatttttatttttcctgttacagttatgatcaacaatcaagaaaggtacaacacactagtcttgttcccaaggtctacatctcatcagttgtttgtggtttaagatgtcaaagaccaagaaagttgtgaagatctttcatctgtgaggctaaagaacactgtagagtaccaaccagtgtgtatgggcgctcaactagccactgtgcttggttctcagtgatatcactttctagtcaaaatatagaagactgcacacgcagatgctaatgataccaggcaaggggaactatacaacttctgtgaggctcttgatctgtattcttatgggtttcaaatggcaatgaaatgggtctgtagggtagagaaggtcttcagatgtggattcttagccatgggaacaaagacggcatgaggaaaaacagaatgataaacatgacacatgacactccagaaaaatattcttccaaatatttatatgagaaatctagccctgtttcctcaacatctgtattctctatcactgtaggctgagaaataatttcttggcacagttaagggaattttttttcttttcaacatattcaagatacagggttacacagagtccttgccatcacatttttcttttttgaaatttccttctcccaaatgtttgtgtcatgagagatcatgagtagcaaaaagattattgtgacaagtgagttccaatcaaaatgcaattttattaaaaattatattagaaatgatggacaataattcttttcaatgacaaaagctaaattttaaacttaagaaactgtgaaaatgaatatgtcaaaaagaaatgtagggatgtacaaaagtaaatagacaaaaaggtagacactgtgacatccaagtgagtcgcttcagttgaattctgaatgtgaaagtgagaacctagtgagacaacattatctggatgcctcactgagccctagagtagaagataagtgacttagcaggggttttcttttataaatgaagccttaaattaggaacagagagctgagatcaaagaaagagtctaccatgtatcaataggacccagaaagtgacaagccagtttgtgaagaccctgaaattgggaaaggcagtttgtaccatcaccacagtacctggagcccagatttagtttgaaagaggcactttggaaaagagttgtccataattgttgttattttatagtctattttgtattctataacagaaagctacagattgggttctgtaatcaataaataagagaagagtagttggctcattgttgagaagtcaaagaataaggactgcatctgtgagggccagctttctgttcataatatgatagaagtcaacatataataaaagggaattttaaaaagagtaaggtctgatttccaaaatatacaatgaattcaagaagctagccaccaaaacaccaaactatgaaatcaaaaagtggggtgcagaactcaatagagaattctcaacagaggaatctgaaatagctgaaagacacttaagaaagtgctcaaaaacctaggccatcagagaaatgcaactcaaaacaactctgaggtaccacctcacacctgtcacaatggctaaaatcaaaaacactaatgacagtttatgctggagaggatgtggagaaaggggaacacttctctactgctggtggctgtgccaacttgtacagccactttggaaatcagtatggtgactcctcaagaaaatgggaatcagtctactacaagatccagcaattccaatcctaggcatataccccaaagaagcacattcatacagcaaagacatctgttcaacgattttcatagcagcactatttgtaatagccagaaactggaagcagcctagatgcccctcaacaaagaatggatagagaaaatgtgatacatttacacaatggagtactactcagcagaaaaaaacaatggaatcttgaaatttgcaggaaaatgaatggaactcgaagaaaccattctgagcaaggtaacccaatcacaaaaacaaacatgatatgtactctctcgtatgtggattttagacatagagtaagggattagcagcctacaatccacactgccagataaactagtaaacaaggaggaccctaaaagagacaaactttgttccctggagaagaggaaagggtcaacatcccctgagcaaattgagaacatgggaagagggaggaggaagctacgagaatgagaagggaagaaaatgacgcatgcagaggtcatgggggagcagaaaggttgagtcaggtgtagattagaagaaaggatatgtgataggtagggttttagtcgagggggtaatagggaggaagggagggagaagggaactgggattgtcatgcaattcaatcttgtttgtaattaaaattttaaaaagtcaaaaaatgaaatggaaatattaaatccaaaaaaaagagtaaggtagggccaaatgtgcttttataatatggccacatgtacagtgatcacactaatccataggaaaaagtcctcattacctacccagctcttaaaattatcacctcttaacactgcaacactgaggaccaagttttcaatacatagactctgagggacacattcaaatcataatattccacttgcctcccaaaatccaccgcattttcacatgcaaaacatgttcatctcattccatttagcctccaaagcctcaactcattgcaacatcaactcaaaagtccagagtccttaatcccactaccactagaaatacctcagaaaataattcaaggagagatttttgtgatcaagagtgagcactatacttatctgtgggcctaaggacaaataattagaacataattagggaatgcgctcatttagtaggcacaaacatgaggttagcatggacaacaatagacatgctaaattggacaggggaaagcccatgaagcctcagccatacacaaagtaccacaggcaactaaggaatgcggaaaggaagaaaaaaattaccactagggaagaaaacaccgattggttatgcaatactatctcataagaatggttttccctctgatttttaaaaacttattctttgagaaattcatacatgcacacaatgatttccagtctcattcaccaccacccccactccccaactctagattctcctcctaaatttctctagtatttacacctcctaactttttcttttcttcttatttttttgttttgtttggtttggtttggtttctttctcaagacagggtttttatgagtagcagccctggctgctctggaaatctctttgtagaccaggctgacctcgaactcacagacatccatctgcctctgcctccagagtgctgggattaaaggcatgggcccccaccacctggtttcctcctaacttcttgtctactttactatagcccactgagtccaattagtgcatggttataggatcatctacaaaggaccatacctctaaagacaatggaatctcccttcctttaccatccttcagttgtcagtagattctttgatattcagttccatatgcaacttcttcagaatgtcattcactgtctgtgtccccaccaggattctgatcacaaatgatatataatccccagactttccctaaagttatgtgcttccctcttaatcacagattccatccttaaatatctccccttcttgttactttactataaacagccaaaagaatccatgacagcagcttgaatgcttaacgatatagatattttctctctcagataccccaattcattgctcctgaattctgacttttataaaacccagtttacaaataacagaagtttgtctcaaaattatggaggctgggaaatcccaagtcacatgtgatgatggtcttcttgctacatcataagcaaggcatcacatggaaaagaagtacacaacaggatacaagaagagaccagaatcactttttttactaactcactcttgccatagtgatatgtagacagaagtttctgtccagcctggttccgcagctgtttagtcccaaataaacacacagaggcttatgttaatataaactgtttggcctatagctcaggcttcttataggctatctctctcttaatcattaacccatatctattagtctatgtatctccacgtggtcttggcttactggagaatgcccaagcatactatcttcctgatagctatatgccacctctctcatgactcactctctacattcctcttcccagcattctcctggtctggtagacccactgtacttcctgcctggctacatcatgcctgtctattagctgaaacagctttattcatcaaccaataagagaaatacatattcacagcatacaggagggcatcccctatcagtgatctgaattcattcatgaggatagagttcagtgaactaattactccttaatggaattaattggacctagaaactaaaagcctagtttgtgaggatgccagagctggggaagagaagtagaagtctaccagctgcctggagcctggtgtttaaagtctgaaagagaaaattggctaaaagttcagtcacaatctctgtatgaaatattagatcatgagaaaaatagaacaaatcactctgttagaaagagacaatgggaatctaagtgggaatacacactatatttaggactccccagggagaatctggttttttcatttgtcccttgtcagaattactgaaacataggaagcatctctccctctctttcaactatcatcccgttaaagttgaattctgccatgctcactttaagaaaattgttcttgcaaaggtcagagatgaaatttttattgctacatccagcatcctttccacttagatctctctggtgcagctaatactactggacactgctttctgggaagctgcactagcttggtttccatgacaccacacacatttgttctcccagttgccttcaaatctatgaacgtaaatgttccctcaaatcagtgctcagccccttgaccttctctattttctctcttccactgcaggagacaatcacttgtttcatcattacttatagaataattactctgaagtctgtatttctaaacctaagtggcaatcacagatctcgaactctccattgccttttcttctcttagttcacactatcatttcaaggttagcactttggacccaacttttgcctccatctcctcccagtgggctctcccctgtcggacccacagcagtagcatcttatctttccaaatgatttgtgctacattttggacatagctcccaaagttccaacacatttccccaaaatcatgtgtcaattggggccttttggaaatgattagttaattgtagattatagattactggttatcattaggtgcctttattattaaaagcaatctttctctggcatgctcactctgtttcacattgttaccttttaccatatcataatgcagtaaaaatgctctctccagaggttagcaccatgctctgagactgcccagagtcaataactgttaaataagcctctactcattataaattactgagtctgtggcattcattttagcagcagaaaatgataacaagcaataaaaagtttaggataaagtctagttcgagttaacatcatacacacttttattctcatcttttcccatgattcctttttgctaagtataattgaatatatttgattttatggaatgacataacagggaggcaattacttaattttaattctcaactctatttttctacctaaatattcttcaaatattcttgtaactaacagaacctatggaaaataattcttagtattaaagaattttagtagtgccccttgtccacttcaatttcttcctgtctagttttttctaagagcgattgtgatcacaacatgccacaaacagccaagactttagactgctaaaatatgattgaatccctcaggtttcaatcatgtaatcctttaattatatcttacacatctgccttgttgcatccattcttttggttctgacagtgccttcccttgtcctctctgaaggtacctctagttttacgatggctgactgaagcaggacacctctattctggccagacatatcaccctgcttcttttcaatatattggtgcctttccttcctcacaggatccacccagatggaaaccacagcctggacctgaatgttcagtggcaacacaggatccaaacttttgttctctgtgagaactccactcagctctgaagactcaggattaatttccctacatcatgatatcaagagtcttcatttctctgttagaaatatttcttggtttccatcttcatggttgctaagccatgtgctattttattctatagcctgcaaaacataccatggtaggggcacttaaaaataccagtacccactttttctacattcttttcattctagtagtaaccaaccctacttttccaccaagatttctctttacagtatttccaaattcaacaatacatgttgtcactagtccccaacagcagtataaatctctgttctaccaagatctttggactagctcatattttcccctagctgggaatatatggattcattgacaatttaaaaagattccatctatactgatatctggaccctattgctaacagattagtaatttattaatttatgatgaagattataagcatctggttaacacattctttcaattttatgatattcattgattaacgcctcaatctgtaattacatattccctaggttcatagtgaactctaccctcagcttttatttatagcactacctaatcattttattcaattacattatacaatgtgttgctactaagctctatgtcaaaaataatcttaacctggaatagtggcaatggctcagtggattaagtgactattgttcaagcataagaacctgagtacaaattgggagcatggggagagagagggggagttaggagaaagagaaggggagaggaagaatgagagagcaagaagatcaagtcagcaggagaatagaggagagccagataagagacaccatcatagagggagccattataggtttaaagagaaatctggcactagggaaatgcccagaggtctacaaagttgaccacaactaacaatctaagcaacagtggagagactaccttaactgcccttctccaataacgagattgaagactaccttatatgccattctagagccttcatccagtagctgataaaagacacccacagctaaacactgaactgaactctggaatccagttgaagagagggagtagtgatgagcaaaggggtcaagaccagactggagaaacccacagaaactgctgacctgaacaagggggagctcatggaccccaaactgatagctgggaaaccagcataggactgctccagaccccttgaatgaggacatcagtttggaggtctgggtaatctatggggcctctggtagtggatcaatatttatccctagtacaagaatggaccttgggagcccattccacatatatggatattctctcagcctagacacacgggggagggtctaggccctgctccaaatgatatgacagactttaaagatcccccatggaaggcctcaccctccatggagatgagattggggtgcaggggaagagaataggaagagggaactgggattgatatgtaaaacaagcatgtttctaatttattggtttggtggggttttttaggatttttcaagacagggtttctccatattgctttggaggttgtcctggaacctgctctgtagatcaggctggcctcaaactcatagagatctgcctgcctctgcctcccaagtgctgggattaaaggcatgcaccaccaacacctggcttgtttctaatttaatttttttaaaaacttcaaaaaaagaaagaacctgagctcatatccccagtacccacataaaagctaggcatggtataacacttctatgatggctagtgttgggtgtaggctattaaaagggttagctcagccaattgagccaaagttgcaagctctagatctacttagtgacaactttgtgtcaaaaaataaggtagaggccacagaggaagccatggaataatgacctctggcatccacatatgtgcacacacagtctttgatcttaaccttattgtagtggcttgaatgaaaatgaccccaataggtttgtgtatctgaatacttggtccccagttggtaaaactgtttgagaaaggttaggaggcatggccttgctaaaggagatctgtccctgggggtgagctttgagatctcaaaggacccatgctttacctagtctaccattgcctgtctgtcttaaggttatgtctcaatatatgggattccaactactcttccaggaccagccatgcctgcctaactgctgccatgcaccccaacatgctggccatgaactctactaaccctctgtaactaaatcctaaacaaattcttctgttagttaccttgactatggtgtcttgcctcagtaataggaaaataactaagatattttgaagagtccacaaaagtggaaataatgtgcatttgggtctttagaaaagttttataaaggagatgacttttgagattaattttgaagaacatttaggatttgaataaaaagaaaaagataaaagagaatttcaaggcaatgaatagaagtaacaaaatcaggaaagctagccataagtgaagagcaacaattagagatgtttgattggagaatgggatttgattaggagatcataggcaagttagggtgatactggagacagcattggtttccaagtggagggattgagatttactccaggagatgatgggatgtgcaactccaaccaactgtagtattcacccatagtgagcaagtcagataagactctacaacctgatattcaacttagattagaaaaaaaatagtagataatagctattgcctagagatgaggacttgaagaataatgagagcagaattagagaaagtgaattacccatggtagttattgtgtcattgaaaaggctaattaacctgaggtgagctgagaggcaagagggtaaataataagaagctagacaaaaagaatagggataaagattatatagactttagaggtgaaaaagaaaatcaagcaagcagaaagagaaaagaataagtttgatatcttagaagctaagtaggtttgagtagtgactaataatggttgacttttaaaatagtagcagagaaaatagggatgaaggtcattggtgctataaaatacttgccccccccccccgacttaattcccacacctaattctgtgcctgggaatgagtgcacaaatatgagtatgatgtattgatgaggtcatcagcaatgacagacttttggtgtccagggcctcagaagaaagagtgggaaaaaggaagatgcagacatctcagtagttgtgtatgtcaccaaaaacagtcatgatgagaagtgagaaagtttagggtaagaaagcatcatgagtcattaaggaaaggctgaatgacaatagtagaaaactagtaagcttcaaagcaaatagaaaatttgtgcttcactgtcctgacctgcaggacatcaacctggggcaagagagtcagggatagggaatggggacaagagacacagaaagaacgaccacaagacaagattctgatcaagtggcaaactttacttttttctcaggctagcttatatagtcggcagagcaggatatggggaggggtagaatggttgtttgtgagccaggtgttagtgtaggcaggatattaggaagccacaaagaggatgtttggcaggataaagagtatatgagtaagaggtccaggaaggattgcctaggtaactgagcgtgtgggtggaggactaggtcaggttgtttcttttcttgagctgaggtactaaggagctgctatgtcaaggttaactatgtggcctgccaagcatgacctaggatctcatgccaagccatgagatttggctagcaacacttcacaactacctttaacctcttagtaatgcccggatacttcattcctccataattaattaatcaaatacaaaaggacaaatagactttttagagtaaccaaaaatagaacacaggctattttccatagctttagtaggtatgcaattgccctgttcccatatccctttctgcaaagcacagggtcatgagatggagagccagctgcaaaatggaacaaggccttactcttgttgtcaacctgaccccttgttccatctgtaggaccttgtagctctgcagctcccctcttcctagaaataaaatctgggtcacaggggttagaactctaatgaataacttccattgtctaatgaataacttccattgatttcccacctaggagaatcagcattccttttccaacaacagctgtgattattggcagaaagaaggaggaacctgagaaggcttctctccacccctcaacatcatcaaaggcacatataaaacctaaatgcttggagccttaagagtgtagtgggcagccatctttctgtctcctactcaagtaactgctgctgctgctgctgccatagccctggacaaagagcatggacaagatgctgctgctgcttggggtatctatcctcctttcagaagcctttgctcagacaggtaagaaatttaggctacagtcagggagagaaatcgatcttgagctattgtttctctgaatttgttgaaacttactatatgtcttactttatctcacagacctcacaggaaaggtatttgtgttccccagagagtctgaaactgattatgtgaagctgatcccacatctggaaaaaccactggagaacttcacactgtgtttttgaacctatactgacctttcccgccctcacagtcttttctcctacaataccaaggacaaagacaatgagctgctaatttataaggaaagaattggagaatacggattgtacattggaaatttgggagccatagtccgtggggtggaagaatttgcttctccagtgcatttctgcaccagttgggagtcctcttctggcattgctgaattttgggtcaatgggaaaccttgggtaaaaaagggtctgaagaaggggtacactgtgaaagcccaacccagtattatcctaggacaggagcaggataagtatggaggagggtttgataagtcccagtcctttgtaggggagatgggggatttgaacatgtgggactctgtgctgaccccagaagaaattaaatctgtatatgaaggttcctggcttaagcctaacattctggattggcaggctctggattatgaaatgaatggctatgcagtcattaggcctcgtgtgtgggattaagatcttacaacaaaatctcatgaaaatgaaatgaccaatgtccaagaggtcaagtcagcacaactcaacacttaatcctgaatctgcagccttttctcgcttgtgaacttcctgtctacttatctgcctaataaaaatattatcaagttctgcctgcattctttgccacttgatgtaatctcaaatgctttcttttagatttactccttttgaaaattggtgctttgatatctagaaaaattgagttgtaaaatgaagggatggaaaattaacaaagaggaaaatggcaacacttataagctactggtaatcaatttaataataacacaaaatattgtggaattgcagtagaaatccctccacttgtttatccaaatacaagtcaattaaaaagcctgatatagctcaagggacacaactataataagacaggtaaatgacaattgagatcttgacagcaaataatgagatgggaaatccaggataagaatgaaaactaaacatgtataagaaactgagattggtcctgcgacaggtgcccgagcctcagctgagtctgggcactgctctgcccccacaagctccccattcaaccctgctggcttctgcctgaacctcccccccagaggagtggacctggccagactggaaggcaaaccctgagttgggacacacctcacacctctctatactctgccctcagtcctgcagtgggcatcctagcctcaggtgagtctgggggctgctctgcccccccaaactccaccatcaatccctgcttgcttctgcctgagctcacccgagcaagagtagacctgcccagactgggaagtcccaccctgagttcggacacacctcacccttgtccacccaccaccctctgccatctggctgacaccagaggctgagccctccgctggccactggaaaaagggagagaccccacctgcactcactggaagaagggatgggtcttaaactgaccataaaaagatacaggctaacagaatggatacacagacaaaatccatcctgctgtatgcaagaaacacacctcaacttcaaagacaggtgttacctcagagtaaagggttgggaaaagattttccaatcaaatgggcccaagaaacaaactggtgtagcaatcctaatatctaacaattcagacttccaactaaaatcaattaaaagagatgaagaagagcattttatattcatcaaaggaaaagtccatcaagatgaagtctcaatcctgaacatctatgccccaaataggaaggcacccacatttgtaaaagaaacattacaaaagctcaaactacacataaaaccacacacacttatagtaggagacttcaacaccctgctttcaccactgtacaggaccaccaaacacaaacttaaaaagaaacaaatgatctaacagaagttataacccacctgggtttaacaggtatctatagagcattccaaccaaacacgaaagaatatacctttttctcagcaccacattgcaccttctctaaaattgaccacatagttggcaacaaagcaaacttccacagatacaaaagaattgaaataaccccctgtatcttatcagatcaccatgctttaaagctagaattcaacagcaatacaaattgcagaaaacctacaaactcatggaaattgaataacacccaattgcaccattcctggattgaggaagaaataaaaaaagaaattaaagacttcttagaatttaatgagaatgtagacacaacatacctaaacttatgggacactctgaaagcagtgctaagaggaaagttcatagcactaagtgtccccatgaagaaactggagaatagtcacatgagagaattgacagaacaactgaaaattttagagaaaaaagaagaaaactcaccacagaggagtagacaccaggaaataatcaaactgagggctgaaatcaataaaatagaaactaggaaaacattacaaagaatcaatgaaacaaagagttggttctttgagatcaacaagatagaaaaacctttacccaaactaaccaaaagacagagtgagagagcacgctaattaacaaaatcagaaatgaaaagggggatataacaacagacactgaggaaagccagagaatcatcaggtcatactttgaaaacctgtactccacaaaatttgaaaatctaaaggaaatggacagtttcctggatagatatcacttaccaaaattaaaccaagaacagataagcagtttaaatcaacctataacccctaatgaaatagaagcagtcatcaaacatctcctaaccaaacaaagcccagggccacatggcttcaatgcagaattctactagaaattcaaacaagagctgataacagtactccttaaattgttctacacaatagaagcagaagggacatagccaaactctctttatgaggctacaatcactttgatatccaagccacacagagatacaactaaaaaagagaactacagaccactatccctcatgaacatcaatgcaaaaatactcaacaaaatattggcaaatcaaatctaagaacacatcagaaaaatcatccactataatcaagcaggcttcatccagggatgcaggcatggttcaacatatgaaaatccatcaatgtaatccaccatataaacaaactgaaaaagaaaaaccacatgatcatctcactagatgttgaaaagcctttgacaaaatccaaaatcccttcatgataaagatcttggagagaacaggaataacagggaaatatctaaacatgataaaggtaatatataccaaaccaacagccaacatcaaaccaaatgtagagaaagtcaaattgattcctctaaactcagaaacaagacaaggctgtctactctctccatatcgcttcaatattgtactggaagttctagctagaccaataagacaacaaaaggagatgaaagggatacaaattggaaagaatgaagtcaaactttcactatttgcagatgatatgatagtctacataagtgacccgaaaaaccctaccagggaactcctatagctgataaacaccttcaggaaagtagcaggatacaaaattaactcaacaaaatcggtagccctactatatagagatgataaatccaatgaaaaagatatcagagaaacatcacccttcacaatatccacaagcaacataaaatatcttggggtaacactaacgaaaaaagcgaaagacctgtacagtaaaaactttgagtctttaaagaaagaaattaaagaagataccagaaaatggaaagatccccatgctcctggataggtagaatcaacatagtaaaaatggcaatcttgccaaaagtaatctacagattcaacacaatccccatcaaaatcccaacacagttcttcacagaacttgaaagaacagttcccaactttatatggaaaaacaaaaaaacagaggatagacaaaacaactctgtacaataaaggatcttctggaggcatcaccatccctgacttcaagctctattatagagccatagttttgaaaacagcttggtattggcacaagaatagataggtagatcaatggaattgaaccgaaaaccctgatattaacccacacacctaggaacaccttattttttacaaagatgctaaatctatacaatggaagaaagatggcatctttaacaaatggtgctggcacaactggatttggacatgcagaagattgcagatagatccatacctgtcaccatgcacaaaacttaagtgcaaatggatcaaagatctcaacataaatccagccacactgaatcttccagaagagaaagtgggagatacccttgaattaattggtacaggagactgcttcctgaacattacaccagtagcacagacattgagatctgcaattaataaatgggacctcctaaaactgagaagcttctgtaaggcaaaggacacagtcagtaaaataaaacggcagcccacagaatgggaaaagatcttcatcatccccacatctgacagaggtctgatctccaaaatatacaatgaactcaagaagctagccaccaaaacaccaaacaatgaaattagaaagtggggtgcagaactaaatagagaattctcaacagaggaatctgaagtggctgaaagacacttaagaaagtgcccaaattccttggccatcagagaaatgcaactcaaaacaactctgagataccatcttacaccagccagaatggctaaaatcaaagataccaatgagaggatgtggagcaaaaggaacactcctccattgctggtgggagtgcgaacttgtaagaccactttggaaatcagtatggctgttgctcagaaaaatgggagtcagtctacctcaagatccagcaattcctctcctgggcatgtacccaaataatgcacttcatacaaggacatatgttcaaccatgttcatagcagccttgtttgtaatagccaggacctgaaagcaacctagatgctcctcaactgaaaaatggataagaaagtgtggtacatttatacaatgaagtactactcagcagaaaaaagcaatggaatcttgaaattctcaggcaaggtaacccagtcacaaaaagacaaacacggtatgtactcactcatttatgaattttagacatagagcaaaggattaccatcctataatccacactgccagagaaactgtaaacaaggaggaccctaaaagagacaaacattgtcccctagagaaggggaaagcatcaggatcccctgagcaaattgagagcatggaaagaggagagaatgagaggaggagaagaggaaagaagaggaagaaatggaggagcagaaatattgagttgggggaagaatagaggagagcaggatgagagataccatattagagagagccattatagttctgaggagagatctgtcactagggagatttccagagacctacaaggatgacaccaactgacaatgtaggcaatggtgaagaggataacctaaacaccctttgcctataataaaactgatgactactttttatgctatcctagagcccttatccagtggctgctggaagcagaggcagacacccacagatatacactgaactaaagtctggaacatatttgcagagagggaggaattaagatcaaaggggtgggtaccaggctggtgaaacccacagaaacagctggcctgaacaaaggggagcacgtccaccccagactgctatctgggaggccagcatgggactgatccagacccctgaacatggatgtcaatgaggaggcctctgcactctagggggcccctggtagtggattagtatttttctctggtgtaagaagggactttgagagcccatcccacattaagggatacactcttggcctggacacgtggggaagggcctaggcccagtccaggatgatgtggtgaactttggggagcccctgtcaagggccctaccccctaccctgcctggggagtggagggtggatggggtggggaataggttgggatgggggaggggtggagggtagaggagggagagggagaagggattgacttgtgaaacaagcttgttcctaatttgaactaatgaaaaaattaaagtgaaacaaaagaaactgggatcattttggacaaagaaaaacatgattgatgtttcaaaattcccaatggtggtgtataacacctggcttttgtaaggtcacccaaacgtcatcaagagcagaaacgtaaggactctctctctcttctctcactctctctctctctctctctctctctctctctctctctctctctctctctcttcctctctctctcctctctttgtccctctctctgtttctctgtctctctctgtctatctgcctatctctgtctatgtctctgtgtctgtctctctctcacacacacacaaaaactataaattggaaaccatactgtacaagcaaaaataaataacataaaaattctcaaccaaagcaatatgagaagaaaatctgcaaaaatgccattagttcattttacgtttgtccagtagagactgctggacatgaggccttgttaagtgtcatttatatacctagtgactccactggtgaaaactgatttttcttttgtgagaagttgtcagttggagatagctccctagttagggatggaaacacacgtccactttctcctttcagttcttgggacctcatctggcttgaagctgtgatggccctgtgcatgctatcacagtctctgtgacttcatatttgggtcagtccctgcgactggaaggccttgtttccttggtgcccttcatatcaactgactcttctacatctcttcttccttttctataattttcccctgactcgtgaggggaggggtgtgatgaagccatcccatttaagactgggtgctctgaggtctctcaccctctgcacatcatccaggggtggtttctgtattagttcctagctgcatcaaggaggaagtgtctctgatggctgaattcaacatccctattacaagttcaggtttgctttatggtctttaatgttaaggaacctttctagggactcagaggtggttccacagacaagagcatcgcctgagcaagcaggaagacctgaattcagatccccagcacccacatcaaaagccagatgttgtcatatagacctggaaatgcagtgttgggcctgggagtgaagacagaagatcactggaactcactggtcagacagttcatcaaaaaaaaaaaaaaatggtgagttccaggttcagttagaaatcctgtctctaagagatatatggcagagaaggaccgagtaggacacgacatttttcttcttttcttcctcacatacataccaatgcgtgcacgcacgtgcacatacacacacacatacacacacacacacacacacacacacacacacacaggtgtacacatttacatactctatacacacatggatacacagagagatacctttcaaaagacatgtactaaaaatgactatctattcttgagtaattggtatttctaccaacagcatgcaaacacattgtttgccttaatattgcatctctatagtaggctgttttgtttagcatcccctctggaaataacataaaacaaattttaggaatgaacccagtacactcaagtagtagcgtccattttttcaatatttattgagccacaattccattccaggcatgatgccagctactggaaatgttatactggtgaaataatcatggcacttgcctttttttggagtttatattctaagtatgggtcccttctaacaataatcagtctgtgctgtaatccatccttcacatcttcaggcttctcttctgagtggtgtgctcctgttcccctcaactcccacctaagacagtggtatcatttattctcatctatcattttgtaactatgtttgtgtctgttagaatccagtttggagccgggcagtggtggctcatgcttttaatcccagcactagagaggcagaggttggcagatttctgtaagttcaagaccagcttggtctacgaagccatagagaaaccctgtcttgaaaaacaaaaacaaaaaacaaaaaaaaacaaaaaacaaaaaacaaacaacaacaaaaagaatccagtttgaacccagtttattgcatataaaacccccacctggaagggctcttttttatatagaatccaagatgatgatgtatcagttctttctgttatgtggcccaaacttcatccaaaaaaaaaaaaaaaaaaaacactcatgcatcctttagtcctgtaaattctaggagttcacaatgatcttaattcagacaatacttccctacttctacaatggccctggccttctcaagttctgtgagacttggaataccaaggagcatgttgcagctttgtgtttccatgggaactgtctcactaagcctgaagtgaaagaagctgaaagaccaataaccatcttctcaagaaaccagatacatgacccatgactccatcaagcaacaactcaaagcagtacctctctctaaaaaagttctttcccttccctgtagtcggtcacaccttgttttggctgaggaatacaagcatcacagattcttaatcatttcctttgtcaattcttgtatgtggaattgtgtagttattatattatcatcatctaatttatattattaattattcattcaagactaaataaaatttgtccctctaagagtcaaaaaccgtctaacaaaaactcaaatatcaaacacaagaagccctctttttaattgtttgtcagggttgtctaaaaattcttaagacattacaagctattgttcttgccattggttgtctgcccaggggtagaagttaaatccctaatattgaagacatcgtgcacttcaaacagagggcccagaggttcctgagctagaaatgacttgaatgtctcttttctgaggactaattttcatggtaccataatgttccatgtaagtttccaaagatggaaacaaccaatagtcctacccagttgtgacaactatgaaacacaacgaccagaatgacacagtaaccctaagggcacaattgtggcatccatgccttggaagtaaccaacaactctctaattgaactgaagacccaccttttcaacaagaaggaaacaatgcctggtactagatacctagctcttaggtgtaggcattatagatgtatctattgggaccgggtccacaactcagaattttgattggctgtagttttctgtaatggcctccatctgttgcatagagttttcttgacgtggagtcagctgcagttagctttgagtatagagaaaacatttagactgtagttaggaattgtgctggcatagtaaagttgtaattgtaggtccttcttctttactaggcctaggcaatttgttagaaaggaaggcataaagattctaagagccagaggaatggtacatttgctgtgatattgtatctcctaggaatgtcagtaatatacccatgaagtctgaacctggctgtatatcatgacttgaacaagaatatcattggaaatgtcagtgtagaagtgggttatcacatgagccctcaaccgaacataaggaactacaagcaactaaggaatgctgagagtgggagaaatagtcttccccagggaagaggacatcaattagttatccaataccaaatggtcagccctgaagacagacgtacaaattgagcatattgcatttctgcatttaggagtatgtgtgtatgtaacaacaactaatgaagaaagagaccatgaagagcaagaaggagtgtatggaagtgcaaaatagtgtcgttataataatctcaaaaacaaaagaaaggacagttgcatgtaagtattatatttaatacaggaagagaacttctgataattgattatgaacatttttcccaagtacaatagaaacagcaaaatatcacagaggagatgacttgagtgatttggagtctataaggaatatagaaatatttgagggtcacaataatccgggcaagtgactccaggtatactcatttcaacattgccttgataatctacccttctccatggttgtcattaaaactgtgagactccgtgaacaagagatacagttttgcaatgaggggcctaataatcatctcgataaactttttagtcgctttgttgtataaagatgtgattcatatttatgtgtctacagaagagcaggtaagagcattttccaggttccagactgactttttatcagagtagaccataatgaatttcaagagagaagacattgcatttagtgctctgtagtttcaaagggaaactatgtggggatgtctgaggctaaaggaagaaattctctttgacttgaaatatgccttagctcagacttagttggaatagagatgaaaagggtatttggtgagcatgagagaaaatcaagtgtaatcttatttggagaacatggaagattttttaagtatttgttaaactctgtgttgtctggaaagaatacatgtataagactattcaaagagcaagatagggaagatattaaagaatcgcctttagtctttaccagaacatggctaaatgcatgataaactcatacagtaacctaattttgtgtatcagggactgaggagatgactcagttagcaaagtagttgctgctcaaattatgggagttgagtttggatccccagcacccatatataagctaagcaggaaggcatgtgattgtaaaaccagcactgggaaggtaaacagacagatctctgaagctctgcgtccagacaacttaggcaaaccaccaagtgccaggttgactaaaagaccatatctcaaaatgtagggtagagggctattgaagaagaaatccattgtcagtctctgacatccatatgcatacacacacacacacacacacacacacacacacacacacacacacatatatatatatatatatatatatatatatgcatgtatatgtattcatacacttgtacacaaaatattttaaaataaaaataaatgaataagaaagcaaatgagcttgtactccagggattctatttagtttttgtccatggccattcttttctaagatcagcatgagaaattctaagagacatccccatacagaggtggttaaggtatatgtgggtaggtgtatacaaccacagaatccaaaaggaaagtgaatctcacgttaccaataccaaggccacagtcacaccttcatcagaatgagagccaaaggcaaatgcaaaacccttcactcggtgctctagaagttgcagcggcttgtccaaagtaatctcatagaaatcctgcagggactagaggtaaagatgcatgaaagacctcctgggtacatgatatggcatggtgtgtgtgcccagtgttcctgtgatgagaactgaggagaatgcctctctggaacacaaagtcctttgctttaactgccttgtatgtctttctacagaatgaaaacaaaggggagggggataatttttcataccccattgtcattctcattcaccagaccgaagccttttctcaacaaatccatgcatgtcccctgctagtagaaaaagtaaggtaagctcttaaaacacagatgaggaacaccgcaattgactttaccaaagactattttcactgaaattaacagaagggaaaatgaaggattcaagagagaaaagaattgcacccaaggaatttcatctcttcaaatgagtttgagctatttttcactggaagaaaatttaagtagcaggccacaaaaaaacaaagtcagcccagtttccttgtatgatcaacttgtgaggacctcccaggctctttttctgcattctgactctgtatagacccaagtgcagtaaaatgccttaggaagttaacccaggaaagagaagtggtcctcattggtggaggggggtagggctgttcctaatcgcagaggttgcatggtggctcctctgaaggcaaaagcaggcatggctagcacctgtctcagctattgtcgccgtttggatcatatggctgtatacaactgcctttaccagcaatgtatggagatgcaaataacctactaatatcatcaggctggcctggtgactaacaaggctaagccttgaaaagtgccagaatgatttgatttgttttaataaaaactgacaatcatgtttacctggcattctttcagaaataaaccacaatgtttggtaatctccaaaaccagaaaagagcacagtcagactctgtactctcaagttggtcagattttcaggtcttgggagggttctgtaccaagcaaaggccacccttcccttgtgcatcccaatgcttcatgccatggtgcccttctcgtgaagtcagccctggctccttctacttaagaagaggggagaaaaacatggaagaggaagagaggggaacattgctattttttattttaatttcactattctttcacacacaaaacttacaaggacttaatccaccttggatattttaatttaaaaaaaaaattctgtctctacaccaatttggtttataaagattgaatgtttgggaaggtcaatggcgtcttttaaaatgtcttcccattttccaatgctatttcctcttccctctcacactattcttccccctttgctttctcttgcttccgtctctggaaggaacattggcttcatggctaagattttgatgcatgagcacatttcagtgttctcactctcccacagggttttatccttctggaatgtgtaaatcattttgaaagctcctttctgtgctacattgtgcttttgagattatctgctggggtgctccttacacagaaacacccgcaggctcagccacagacagggccctgtcttgggtcgtagaagggctgcctctactctgctcagcggcactcacttctggctgggaggactcaaatagtagtcagtgggggtgggtgggcccctgaaaacatagtcattgtgttcattgacaggcgttccaaccactgagactgagctcagccaacctccaggatggagctaattggtcttttgctctacaccctttctgacctcttcccttttcccaaggcaaagtctggtgctccttgcttccttgtttctcctttataggtctctaagaggaccagagagaactgagtggccccacgctcccatctcttcaccattgccccattactttcgggagagtaggaagtcctctgtgtttaccatccgagctatgagctccttcatgcttgtttttaattgagcacctcacatgagacagcttaaaagtgagacacttgctgtatggaggactcttaaaatcccccaggtagagaacaaaataaagaaaaagcacatgctggaattcttctcagggacagtgttgtagttgtaaaaatgcttaggaggagactatcatcacagtaatctttcagtgtaaatgaattcatctgtaagtgtcacactcgtctctacctgaagcatgtggctccttattttcaaagatggagttttttctaacacacagtgatttccagactcccggacatctagatcatttcctagattcctagtggcagttacctaaatatggtgacagctaatgttttcttgcttttttaagtaaaaatatctggaaccaccacttgatatatgatagcaatctcagagtccctcacctaatttctacaaaacattgtgtgtgatgcaagagaaaaggtgggacaatggaagactttggatttcttttctaccttatcctggattttactccccaccatgtgatgtctttttcttataccaaaccttcatccaattctctccactttccaaatggctcaaactgaaggccatgcttgtagcagcattaaatgaagccttcaagcccctgaggggaattatttagtaacccaaaaccaaattatatctctttattgttcagcttccttctcccaagagaaatgttagtatgccttccacccctggctttattgaaggtctaatagtctgatgctattaggggcctctcgcttcttcccagtagcttcccttctctctctagttacttgccccaaaccctcaaatccctgtggacacttttacaatagagtgatatttgcctgtgattcatttcacctaaaccattccgactggaagaataaataccacatcttcactcctactgtgttcctgaaggtcagctctccctcggattaattctgtccacagtacagcattgctagaagtttctcttaagcaaagctatcaacccatgagtctaacacagcctggtgttgtcccagctgctcatattttccctaggacagaaacagggcaaatctgtgggggggtgagacaggactcctgtggctttcatacaggaaaataaaatgctatccacccatgcaccacacaacagtatagcagtacgtcctcagaagagataagcagcagtctcacactgtggggctttggggatcagagattaaagggaagaataaggagcgagcaagacagatggtggggaggacatgacatactcgaccctgtgaaccaacatgctcttgagtagacccccaaagtcactgatccctttcttcctcctcttctcttttccttccttttctcttgcctcctcctcctgagcttcctcctcctcttcttcccactcttctccctcccttcccatttctccaactctaccctagaatccatgctatgatgaaaatgccttggtcttgacaccttgcattgctttcagacacagcaactggaggacaaagaagaaacctcacaacctggcagaggcaacagggtttttatgttgttttcctggaacttttttgactctgtgaatacaagttcaccctcttattgttttctcctcctgtactattaacccccactcgtagtattgtactaccattgtgacaactctatttctgaccatcactcccatatctccgtgtatttgtgaaatgctggctagctcagagacagggtacacagtggtggtcttccatggctgttcaccagccttgtagcccagaaccaacctaggaggttttacaatacagtcactctcctttgttaatttagcctccacctactacttcttgttcacagagatgttacaactgctatgtaattatctgaaaacctgtgagattcaggcatcatgaagaagagtgtgtgttccccttaaaaaactggagcttgcaattgtgaccatggtatctgtccaggtgatatacccctttttaccttttaaagtagttgatcatttcttctgtggcatcttccctaacacaaaactctcttgtgttgatactactgttggtaggaaatgatttttactgtcagcttatttatgatctgatccctatgagtctgaatgtcaattcctatgtcctcttcctttccactgtctccaagattgtccagctaatagctgaatgaagacctttgtcaccagtacctcactacttactctgagcattgacaatcatggctattcttctattgcttacctcaaccccaaatcagaaaattctatagaagaagaccttctccaagtcacctacacctacaccaacactcctctactaaactgtttatttacaggtcaggggacaaactagtcaaatgtgccatatgtataagtgtggacagatatctcaatggaactattctgaagaaacagaactgtgtctttgttgcattaaacaacctcacagttctgatgtgggaagtctgttctgaagtaggatattcacatcttacctcaatatcttcatttaaaaatattacttttgaaaaaaatattacttttgtttccaataattcaaagcttttctcagacattttcaaataaatatgcactattcaaaaaaaagcatttccaaatttcagaaatggagtgagggatatatttgctcaagttttcatatacagtgtatcttagaaatatgtatctcttattccctccatccaggataccccaggctctttcccccaacatgtctacatgtccttcctaacttaatatccttttgtaaaatcttctaagtccatgaaagcttcccatacgggtttgtgaatggagttgtgcactgaggcattggcaaacacatatgaccacatacatccccaccaatgaaaattatttttccctttatcaggagacaaaaactggcattaactcctcatctggaggtggggaatcaggagcctctccatgctggactttttaactctcttgatcttgtgaaggtcttatgtgagtaacacaggtactatgagttcatgtatgtaacagccatatcacgtttaaaaaccaaccttttatagcactctttccaatcttcaagctcttaccttctttccaccctcctctcctataatgtgccctgtgccctcagctgggtgatagatgacgtaaatgttccatcagtgaatgagcaactgagttgcttttcctcagcattttgaagttatgactctgcattaaccactgcccactgtaataagaagcttctctgaccaaggctgataacagcacaaatctatattatcataaatatttagaagagagcttgacaacatgaccatttagaaaaaaataacatcaatagactatccctctagggcctatggcttccctggccttgtggtttttactatgctctaaatattttacaaatatttcataagacatcttaacacattcttagtttaagctaactcattgctattcttcgtttccccattgcctacctccatccccacttaagcctttagctcccagtattccccctcaagctctttcgtatcagagatatagtaataaaaaagcattgtgctgtaactatagctacatgatctttaacaaagatcccccaaaatatataatgatgaaaagacagtatattctgcaaaaggtgctgagaaacatggttttcaatatgcaaagataaagctagatctttttctctcaccctgaaaaaaagctcaactgcaaatggatcacaagcctcaacataagacatgacgtgctataggaaaacatcaggagaacacttcaacttacatgcacaggcaaggaccttagtaggactccaacagcagagggaatcaaaccaaccaccaacaaacaaatgggaactccagaagctaaaatacttctactcagcaaaggaaattgacaatcaagtagagaggtagccaacagaacagaaaagtttagccacctgtacatctggcagaagattagtgcctaaaaatatacaaaaaaaattgaaactaaatgtcagcaaaacaaataattcaattaaagatcatctatggatgcaaaactaaagtactcaaagtaagaaatgcaaatggcctatatacacttaaaaaagaattcaacatccttagctatcatggaaatatgaattaaaaccatttaaaaatcccatctcattccagtctgaatagccatcatcaggtattcaaatgacaacaaatattgacttggatgtgataaatggaaactcttatacactgttggtgggagtgtaatctagtgcaccaacactggaaataagtctggaggtttctcaaaaatccagaaatagaattaccacatgacccagctataccactcctgagtatatactccaaggatttcatctttctatatagatcagtgtacattcattttcacttctgatctatttactgtatttaggaaatggaatcaactagatgtctttcaacagatgagtagataatagaaatgtgatacatatacatggtggaatagtactagctataaagaaatgtagaatcataaatttgcaagtaatgggatatttgcaagtatattttccttaggacactgaagcccccaaagacaaatgcctcgtgttctctctcatatgtgggtgctagcttctaattatgtgtgcttgacctagagtacacgtggaagtaaggaaataagtgacaggccaatgaaggggaaaatgcattgatgaagaagtgatagtagattctaggtgagatgaaagtatagatggggaatactgggagaagaaaggtacttcttttaaatataaattttataaaatatcttataaaataagaaacaatcttattttacatatcaatcccagtttcctctccctcccattgtctcatgccccccaccaacaccccattccacctccatccactccccagggagggagaagccttccatgggtatcatcaaagtctgtcacttcatttggggtggggcctaaggcttccctcatgtatctaggctgagagagtatccctccatggggaatgggctcccaaagtctattcgtgcactagggatactggttccattgccagaggccccatagactgcccaggcctcctaactgtcactcatgttcagggggcctagttcagtcctatgctggttccccagctgtcagactggggtctgtgaactccagctgtttctgtgggtctccccagcatggtcttgacccctttgctcatcatccctccctctctacaactggattccagaagttcagctcagtacttttatgtgggtctctgcttctagagccttcatcaaatagctgatggaagcagaaaggtacatcttaaagtcacttataattgactgtttgggactcaggagatggccccattgataaagcagttgccgaggaagagcaaaaacctgagtccagattccccaaaacccatttaaagccagacatggcagccaagcatacatgcataatcccagtcttcatacagcaatacgggacaggagaatccctggaagatgaccagctacctagcctggtttacatagcaatgaacaacaatggaccctctttcaaagttggaaggtaaacaccaacatgcaaagttatcctatgatctccatatgtgtattatggtacacacatgcaaggatatacataagtacatacaaacatacatacatacaaacaaacacacacacacacatacattcacagacagaaagattaaaaagtgattgttttatgttttatcaacagaaattattagttactatgactttcacaataaaatctatagaagttagaaacagacggcaagtgaggagagtcactggtgaaggagtccctcaaaagaaaatcatgccagattcttacagggaagttgatagataatgtatttttaaaactaatgccacattaaaaacatcagaatggactggcttagtaattgaaaatttactctttattactcgatttatactaaagactttgctttcattatatatggccctaactgtgctaagtgtgatcatagatcatgcataattctcacctctccaatctaagtatgctgatccaattctctatggttgctggctctatccatgaaaccagctcctctctaattgctatgatgataaaatgagttggtagaaaagatttatgcactgtttggaggaagaaccataaaagtgtttttcacttccacataccatgacacctgatagacaatgacataatggaaaaaaaagaacaacaagaaaaataggacagcagccagaagccattcagaaacacaggtttttaaatcatttaactcacaaaataactgaaaagaaaaaaatgtatttccatatgaggccccttttaaagaaatcagctatatgggcctgctttgtattgctctaaaataccactgactgggctgtttataaagaaaggagctcatgaccctggaggataagtctaagagcttgatatcaatacctgttgatgaccttcatgccacatcattgtacattggaataagagcgagagggtatgaggacgatggaacaaaaggggagtaaattttataataaagcactttggataactaaatcactcctaccaagagtactgacctactcacaatggcttttatctattttcaggtctcaccttccaatattacattaggcattaagtttccaacttgagggcccagaagtccaaagctggatcttacttgaatgtctcctccctgaggattagctttcatggtgccagagggggccatgaaagcctccaaatgatggaagcaaccaacaatttcaccctgctatgatgcctaggaactacaatgaccaacatggcatgataaccctaacgatgcaatagtggcacacataccttcaaggtagccaacagctctctaattagacttaagaaccactcttaacaagaaagagcctacaatttccactttactaagccagcataggatccaactacagtctacatattggtccttatacccacaggtaagtgtaattctcagctcacatcaaggaaacttctctttgcaatggagatcatcacagaaaaccacaaccgatcaaaatgctgagttgtggagtccagtcccagatgatacatctacaacacaagccctatatcattgtggaagaacaaggagaaaaaattgtcagagccagaggaaacagggagtttctctgtgagattgtgtcttctagaaatgttagtagctccacccatgaagtctcaccaacctggccacctaaacatgatgccaacaaaactagacatgtgaatatagaagtaggaaaattagtgaggtttcaaccctagacaaacagctacaggcatctacggactgctgatggaagaaatagtcttccacagggaaagtgaaaatggaaaggatgaggttatatttaatctcaaaaagtaaaaaatatttttgtttgtttgttgtttttgaaacagtatctctctatgtaatactggctacctagaccaggatgctttcaaattcacagagattctcctgactgcctcccaaatgctgggattaaaggcatgtaccaccacatcacttgaattgtgagatatattcgcattatatatccttactctcaaattttctaggaagttcttttctgtttttttccatgcatatatttcatgttctgctgtgttgggtgttttttttctagtttctttctggtatgatagaacattaaccaaaaccaacttggaaagaagaaggtttgtttcagtttacattcacagttaatcactggggaagccaaggcataaacttgaggaaataacttaaagacaggaactgaagcagagatcgcagaggaacactgcttactggctcactcccaggcttccatgcagctacccttttgtacagcccagacacaactgcccagggacagcaactctcagtgggttgagccctcctgtatcaattagtaatcaataaaatgcctctctcagacatgcccatagg

SEQ ID NO: 117 - DNA, 144041 bp, synthetic construct
  source 1..144041: mol_type = other DNA; note = Hot spot 2 - integration site
ggtgacccagacccagaaagacagatagggtatgtattcacttataagtagatattaactgttgagtaaatgataatcaagctacagtccacagacccacagtggttaggtaaagaaagaagagagccctaggtggggacatggatttccctgggaaggtgaaataaaatagatttttttcaggtggactggaggtggatgaggctgagaatggaaggaatcatgtgggcagaatagaggaagagagtgtggggagacaccagtggaattggggaaacctaatgcagtggaaacttcctagaatctatgaggatggcccatctttggtagccaggcaaggtttacagtggtgggactgggttgtatttggttgagttgttagatgaggaggtcccacagtagagatccctaaacaaccaggctgatgctaggacagaaaatcattctctgaaaactgacagtagggctgcattgccaaggatgacatctacacatctcattgaacacacagaagtaaagccagtgctgcatgcagctttcacccctacattctattcgctttggcaggagaaggtactctggggaagaggggcagtggaagaggactgggaggagtggagggagggaaaactgtgtttaggatgtattgtacaagagaagaatgtattttatattcaaaaactaaaataaaataaaaacaagtgaagaaattgaggcctgaagagataaggaagtttccatggtcacatgggaaataaaggacttggggttgatttgattccagatcaccccattcctatcaccacacactttagaatctagaatgaatgtgaaatgtgaaactttccaattgatagatcagagaaattggcaacaatgattcatgacatcgtaaaagaaaggaagtatggggagtggagatctggacacacagaagtagatcccagagttatagggagtatgaatgggaaggatgagtggggaggaagcaaaaatttaatgtattgatttcctgttatgtactaagatgtgagcttggcaattcacatacagtaattcatataatctccatagcaacactaggagtagcgttcattcctctattttataggtaagcaaatgaagacaaatgaaacgagcaaagaaaatcggatgcctctccatttacactgcggttaaagccaaggatttctataaacttaaatattttgttgcttttatcactgttgcattatagttactaatatttcaaagtgtcacagcctttactgtgcttaattagggatgaggaaagtagaagctgaaatacagtccccacaggcaggagactgagaaattaaaacaagtgattactggaagccaagaaaggaagttaaagtgactaagaagctggctctgaactatggaatgttctgggttcacactgtattcaccccaacatgaaaatgtaacatcttgcttcactgacatattccagaccttagatattttgatttgaccagtaagaggaagtgttttgttcctagatttaccaaatggaaattcctttgggaacgagatggaactggcttcctgactcccagaagtgtacctcatatacttctgtccctggcctgaaccaattcgttctaggcatgcttcttcatggtgtgaccctgttatctgaccagtcgttgacaattcaaaccataaatttgggtggagatctatggccatataccctcagtgcctttactgatctacagatattcttagccaagctacgtgtggctttcagtactcattttccatctttctctttccccatgtctccatcatgcttctctcccattccaataccctgtgaacctcaagagatgttagagcacttggccaggttctgccaaccaatgctgtatcactcctgaggccctgctaataatcacggaccagcctgttgttatcaatatgccaactttagagctatgacagaatttacctttgaaggttttagtagaaccacagatttatttttttatggtctttcaggtcttatacccaccagctcctccaaaaaatgctattgtctgacagttatcagttttcaatctcaaccaccgtcaactttacacacatatatgcttcttcctggttgtactttccactttggagaactgttactccatgtccatcatcccccaaatgctcttccgtctttgtgaccaagaagaagcaatttcgattccaggctgtgccactcagctcttctgtctctcttttggtgttaatggctgctttctgctcacagccttggagtatgactaccaggtagctatcttaaacccacattcatagtcactcatcatgggcaaaagacatgaatgtagttggtgatggatcatggagtcagaacctggccttagcatgaaaatcaatgcactaaattggaagtctccattgtttatgtctgacacttaaaaagctgttctattactgaagacaccacatacattggacacaagacttggataagacctgatttgaaggcctcctccatgaaaactggcttttatagtaccagaaaatgctgtgcaagttgccaaaagaaggatacctatgaactataacaataatcagcatgacaaggtattccaaaaggtgtaatagtgacactcacattgtggtagtaatctcctgctctctaacagacttaagacccactcaacatgagggaaatcatgtctgatactggaagcctaaacaactacccgaggctggtgagatcatggatcttagaacagactctatagctaccactttactagatcagcaattcctaactacatacttaatattttcttaatatttatccttatacccacagataaatataactctcatctctcatcaaaggagcttccctctctttgcctcaagatagaatcaactatgggatataattctagggtataatcctctattggactgggtccagttaaatttcagctgagattgcattcttgctgaaccctttctgttactcctttctctgattctattatctgaaagaatcacctgcatttgggtccttgttttgggatctacttatagagaaactgatataagaaaggaggtgtggtaattttaatgtaattgggccccacaagctcataaggaatggcattattagaggtgtggctttgttggaggaagtgggactctggggggtgggctttgagttctcctattctcaagctactcccagtgccagagaccatttcctgttgcctccaagaaataagactctcagttacttctccagcaccatgtctgcctacataccaccatattcctccataatgataatggactgaacctctgaactgtaagacagccaccccaattaaatgttttcctattctagactcaatcaaatcacaaaggaagtctgaggaaggtagttgtagacttgccataggttgaaaggaaactatgctaatacatactgaaacacagagcaatggaagacttctgccaaactgcctaacctattcacctatcctctttcccacaattcctgtacaccatgacttctttctaagagccaatgattcttagtaagagctacctgaataaggtgacattgtatgtagagagtacagactctgggtccagagtaatacattcctcaaaggttagttcaccactatacacatgaatcataggaaagtcacttaagctccctgatctttattttctgtccttattgtggagctgataacatgtcaaccttccacctctcaaagttactgactaggctaattaactcaatggaataacatttcctggcacataggaagcagtagtattagtacctcctcacaatgatgacctgaccacattgttctgagtcactttgaggtcaacattaatcaccctgtgtggtcttaatgaagatccttatttttaacaatcaagtgattgagttctctctcccaaaaggtcttgacattacaaataagagtctcctataatccctgatctgtattccagtaaaaggtaactattttcctaggatcatccaagaattactgagtacaactgacccatgttaagaaatcactcaaccacctttctgatttctcttccagattaccgtttcttctaccatgctaatttactggcttatcaaatatatctcacagctcccatttctcttgcccttcagagtcagtatgaggaatctcagaatttttgtattcatcaattctcacatacagcctgaagaaacacatacaaaatcatgtacagctatttttaatgtaatgtttatttgaatgtaaaccatttattaagttcacaggtgttttttcagatttaagttttatacaattagataaaatagtgcaattatgattatccaactggaatcaagtcaaaggttcatgaaatagtttgaaactgggccaaagattcataaagtatttttaaaattgggccagcaagatagatctgtaagtaaaggcagttgctaccaagcctgactaccctgagttcaatccctaggactgacatggtagaaggaaagaaagaacaagttttcctctgccaagttttcctctgacctcaacattcaaactatggtgcatcccccccctctctctctctctctctgtgtgtgtgtgtgtgtgtgtgtgtgtgtgtgtgtgtgtgtgtgtgtgtgtttgtgtgtgtgtgtcactctctctcatacacacacaatacatatatgcaatttttaggaatttaaaaacattttgaaataggtaacatccttgttggccaaggagccccatagaaacctctgaacaacccaggctattttgaagctattggttgctctccccaaactagtgttaagtccccattgataaagacaacacctacataattcactgaacatattgaggtcaaactggtgcctacctagagccttcatcctctacccaatagtgtccatgttactagaaagtactctgcagtttacaggaggagaaaggtaaacaccaactcatctacaaatccttccatatacaatgtggtcaggtcatcattgtgaggaggtgctaatactactacttcctatgtgccaggaaatgttattccattgagttaattagcctagtcagtaactttgagaggtggaaggttgacatgttatcatgtcatggtaacctggctgcacaatactctgatacaatagtggcagaaaagttgtgggactaactaaccactgtcttgttggaattaaggtcaactccatgagatagaaccaatacccagcacggcttgagcagcaaagaatctgagactagataggtcatgaaccttgggggaaaacaaatgctattgttctactaaaggaatgtaacttttaaatgactcctaatgacattctgctatactcatagatcctaaatgtgacatgtccatcaaatctctctcctcagagctcatggaaaattgaagaaaaagaggcagaaagattgtaagagtcagtggtgatggaagacaccaaggaaacaaggccttttatacacaagactgacacatatatgaacccacagaggctgtggcaacatgcacagggccagcacagttagttctaaggtagatgaggtcccagggctgaaagaggaagtaggcacaagcccccatccctaactcagaagataactcctatagacaaccccttacaaaggaaagactcatttttttccaacagatcctcactggggatacaaacaatacttgagggctgcctctatgcccagcaatcaatgaccaacagaaagtcaatgatatttttggagggtttttgtctcacaatgttttgtctgtgtatttttccttacagaatttttgcttgtttattggataaaagttttggatattgtttctatgggtttcctgtgtgtgcaaatgtgtctatgcatctatatgtatttttgtgatttttctttgactcctttttaaaaatctgtttacttgtttggtcctactctcatttgtttattttttccatcttattttatttttaatgcctgtttgttttctttttaaatgaatttatttattcttattttatgtacattggtacttttcatgtatgcctgtgtgagggtgtcagatcccctggaactgtcattatagaccgttgtgaactgccttgtgggtactaggaattgaattcaaggcctgttgaagagtagccagtgctattaactgatgagccatctcttcaaccccttcctgtttgttttctaaagagacagagaaagaaagggttttgatttgggtgggtagggaagtagggaatgtctgggaggagttagaagaagatacattgtttccagatattgtatgaaagaaatattttctatttaaaaacatttttaaaacaaaagaaaacttgggagctagacccagtagataacactctcaccgcctgaaggccagatgctataatcaaagtcctgggaggcacagacagctggacccctggagctcattgactttggcagtccagcataatcagagggttcataatcagtgacagaccctgccccaagtaacaagaatcattgaaaaagacactaatgtgccagcctcttgcttccacagttacatgcatacatgtgcacaggtacccacaggtacacagatgtacatacttatctgaacatgggtaggtgcttggatatcacctctcaaagtgactggaatatggtaggaaaagatgcaggagtagacatcctgcaagaacctcaagggaatctgttttgtgttctacttcaggccctggactgacccagtgacctgtgaaaagcataatgatgaggtctagacttgaaatcctcaactaaattggatgtcatgactgacctccaagaacgattagaacctagttccaaaataaaacaatatacggaactggagttgttcacagcagcttcattccccttctttgcaaactgtttgcagagccatcctgtatatactcattcctttctcacccaaatcccaacatgtttactcttggtagcacctgggcttttcatacagcttttaactgtaacttgaattaacaccactgacttcaccagatcctttggaggattaactgagacagaaatctgtaaacatatctgtcaaatattagttgagactgaaactaaacatctctcctttccatcaggcaccacatttttatagcatcagccttgttcctcattttcaaaatcttactaattatcccaggacaacctgcaacttgatccccttgcctgttgagatcccagagctactgatcatatctaatgataggcaattaatatgtaaatcatttctatctgaaagaatgaactcgaaaaagtttattaaatgattgcctttcctcttccgctgcctactgcacattgattcaggcacaagccctattgatttccctcactcacatgaatcccttcactgtgactatccccaacctgtagataaatcccaattatctctgttagatcggaagccaagctggtttctctgcctcttctctcctgcctcaaatccatcaaatcacaatgatgccaggtcagtctttgccagggatgtctttttccagcaaggaagcaagatagacaagggagagggtaaggtggctagcagtttaaaaaataaagtcatttccttaagagacaagttgctaagtctgtgacctgggaggataagttaagaccacttaagaggtccttctcagtgataaaaatctaaatgctgtcaaactttcctcacccagcttcagtttaccgacctccatctaatcaagccatgtctcattcttgtctcactcaagatgatgttcactttggtttattgtcatctctcactgcaaactaaattataaactctgaaaattataaagtctgaataccgtctccttcatgagtgtagttccagagacttgccaaggcctggcatacgataagtgcctgaagaatgaatgaaaacacatcaactctgtgtgttacaataataaagtgttaagaaacctatagaaaatcttcagcaggtatcaaatttgcaactgagtagtagacacttcccagatagagaagggaagaaaaagctgtatagaaaggagagtgctgctctggccctggacacctggggaagggcccaggaccagcacaggaagatttggtggactttgcagagcccccattgagggctctaccctgcctggggagtggtgggtggatggagtctggggtgggctggggtggggaggagggatgggggtgaggggagggagagggagaagggacttacatgtgaaaaaagtttgttccctaactggaactaataaataaatttaaaaaaaaaagaaaggagagtgctgctcttggcctggacacatgggggagggcctaggcccggcccaggatgtgatggactttgaggagccccatcgatggccctaccctgcctggggagtggaggagtgatagggtggggggcaggtggagggttggggggagggttggggggaggagggagaaggaattgacatgtgaagcaggcttgttcctaatttgaactaaaaaaattaattacaaaaaataataaaattaaaaaaaaaagaaagaaaggggagtgctgaaaagcttgccactgtctcctagccaccaagagtctaaagattgttcatttctaaccctcagtgccatggacaaacatagggagaacggaatgtctgtacaaccagggatatctttacatgcatgagtgcatacctacatgcatacatacatgcatgtatgtgcgtgcgtgtgtgtgcacgtacacgagcgctattgggaattgaatacagagcaacctaggcagctcatatctgaccacttttattccaaaataaattccagatttttattctgcatagaatctatgtgtgaaagtaacagagcctaagctttctaagatctatgataatatggctccaagcttgagctgtctaaaccagttttctacactgctttctgcttgaagcaaaactttcccaagacttcttaacactaatctgagggttgggcaaataagacctacacacagtgaggtcttcaggtacctgctgctgtctccactcagctctaaaggcattctcaggctgtctttggggagatggcccagaagctcctcaggctaatcactgtaggacatattctctggctttcagggccctaatatgtagaggctgacaggtgtacccaggttataaacccaaatacagtcctacaagaatgtgtctcctctgcctcctgggtctcagccctgacacatccctcttaggcgcttgttctttcctgcacctgtactgggactcacagagcccaccattccaatctctcccccttggcttcttccaggaacatcctgctattcctggtaagagctctttaggtaaagggggaataaaaattgttaccctgagatgagattcttcataaagataggctccttctcctaatcttctttgaagagttacacaatttcaggggtagggagtcaccaaattctcataactattcttccttaagacaaacagacttcagccagatcaaatacaacaccattagtctctggtaagaatttcttgacactctgaagaagtccccttgtctggtactgcctggtttttgttcagaggctcacagagataaataccatatattttagtatcagattattttctctattgggaaagattctctactgcagcttcagtctcttttagcattcttagtacaaatgattaacagctggtcatcaacttctgttaaatggatttttataaacttgaagaaagtctgcatgctttcatcactggtatgatttactttatgtaaaaagtcactttctgaatatgcataagcaaatcagaatataatttaaataccctacaggagcttactgtttaaagagacaaaaactgtgaaatattacataaattggacttatcctcaaccttcagcaaaatgatgtatcctcatggcaactctgctttttatattcagagtctgcctttccttgggtgagggatacttgagttgctgcatctttcctggtgcaattgtttacctctgcagagtaagtagatggctgtcctcaacatccgattggctgtaaatttgtcttctagtttagggaaggtaaaaatgtagaatggtttacaacatatgtgaatcagtcctgggaactgtcagcagacttccatcattctgacagcagaggggaggggttggtggtttgttaagctttgccttttacttttaggaaaacaagacagacccaactctagctttactgtataaatgacataaaagaatggtgattcatggtcctgaaagtcaaggcctctccagtccatccctaaacaaatggtttccaagcatctaatgtatatagcttggaactagtaatatctgagatgtatctgagtttttgtgtaaggagaagcaaagaaaatggagatataaaataatgcaaataacccagagaacatgaggatagtataactgttgtagagaactgatcatttgtactggtctctgtgtatgaagaagagtagcagggcagaagaaacatttagcagctgtatagtcagatgaagcagactagatgagtttggggcacacaggctgctacaactacaggccctaaagttaagtaaaccaacagggtattaactacaacatgtgtcccaagattcatagctagtaactaaattcaacagttttggactaaactgaaacaatattactattatttgtgtacatttctgatttgataaccactcaatgaagaggcagaacaaccttcatcactagagttactttccaagggcttaccagtggtctgagcaccagatcacccttttgcttttgttcattaaactctgcatcataaatctagcaggcagtgtcatcatcatagccatcatttgagtaggtggccatttttacatacccctgaatttcttcctaaattccatgtgttctttacacaactgcaggcattaaagcaagaacatgacacatggaatgaaaaatgatccactgtgttgactccactacatgaggtctaagcaaaagaagaccagaagggtaagtagggtcagattgagcaggattaatgtaccataataaggttgaccatcttcaacctttggacagtgggaattgcctacaatctggattatgaagcttttctgtagattcatgacactgtctgaaatacataggaaactatgttacagaaatagagaatctgaaattatcattagaaataggagagagaaggtaacttgggtctggagggaatattcagaagcttatacacttaaatcaaagcctaatctaccaattggtggggtggtagggggacagggagtattgttgagatttgctatgaaatgcagatgagtgctcagaggagaagagcttgatgtcatattagagggatggagatacctcagaccttggaactttctaggacatactgatcacttgagtgaagggtggcgtcaataaaccagaaaagttttcaaaggaaaacacaaagacctgaagggcacatgtctctgcacccagatgacagcacaacccagtcctcttcaagattaacagaaacaatgacaaagaaatcaagctatgtctaatgttatctgagaacacaaaaggttgctgaaataaccgagagggttttgtttgttaactaggaaataaaagtacaaaagcattacaggcaaagattttgacagccacacattaaaccttcatggaatttttacctcataccatacactatgttagatatgaaaatgctgaaatggaccctgcattgtaccctgataatggttgttccctgagaggcagaactcaccatgcagcaacgtgacagagaaatcgacagagaatgcttaacatttaatgacaaatttgcaagccttgggatattttttcctgatctatataaagcaaaatctcatcaaggagaatggaccttcatgctagagttcagtgaaataaatgcctgtttcctggacaataaggcattcttgctctgtgtgaggggctgtctcccagggctgagggctatgcagctcctgagtcactcagaacatttgtcaccatggactcttaaggcatttatcactcaggtgttacagaaaccttgtttgaacagaatagcttagcagttggatattacagaatcaaatgtctttaacaccccttcttgcccaagcaaggatcttatctatttttttctcactttcaaacaattccagtctctcacataatgtctggctcaaacaatgaatgagtaactctttccttccatgggattattttgatcgctaatcgtgtttaggttcactttgtgaaagtaaacatctttccacaatgtggtcccttgcccaagatacattcccaaccatcatctcactgatttctcaaaacaatgtagagggaaaacagaaacaagggtttccattataggcaaatcaagacaggaagagtgaagatagaacctgagcttataccagctgtacctgtcattttttctgtttgcttggagtacatcaacacccgaaggtgactcacagtgccaatagtaaaacattggagaatcaatctaagaaatattaaaatttccaaggtctcgaactttctagataaaacaaactctcatctggagtaattttcaaggtatggataatactagagaggaaccctggggctctggctttagcccatggaaccacaaaaagactatctccactgggcaagctgtaaatacccatttgcacagaacctgctgaagttttaggagcatgagtgtattcaccttctctcatatgaaagctactcatacagaaatttttaaagctctataagcaaacctggatcttgcattgatttaagaattcaacagacaatggactcgtgttaggtctagtactgggtactgagaacatagtgataaactatgttcattgcctgttctggggacagggagagaagtagatttttattttgctaattttagcagactagtgagtgctgaactaaagttttgtgccagtaatagggatatagaaggtagattttgtttcatttcatgatttttaagttatgaataatggaaaacaaatccatgttctcagtcagacatcccatctcttcccccattcatataatcaatacttattagcagcacagagaccatgaaatggatatttgtgtctttatggcagtctgttattcctctgtagaaaataatctgcaactccatttgtgagattctatttctgcaagatccatgtgaacctttagatagcatgagtttctctgtcactctctgcctggccagctgagtccaggaaatatgaagtaactttatattctccctgatgaactccatctccctgctctacagaccagagacatacatctctgagacacgtgtaagcctaagggaagcccattcttttgctgtaaggcattaataataatccaaaaacccctgaattaggatgatggttaatgagtatcttcaagacttaaaagtaggcagtcaagaaaaaccaagaaatggcatctaataagtgagaaggccatggcttgagtctcacctactgaccccaaatctccattcttcatgtggtgactgcaatgcatcaatgataaattgggctcctaatcaaagcctactgtgcgttcccaggaatcacatgaagagcagatttggcaacataaagacaggcttaggaaggatggaaaatagagaaagaacagttctttctttctttctttctttctttctttctttctttctttctttctttggtttttcgagatagtgtttctctgtgtagctttgcagcttatcctggcactcactctggagaccaggctggcctcaaactcacagagatccacctgcctctgcctcccgagtgctgggattaaaggcatgcaccaccaacgcccagcgatcatttctttctttagtgattagactgcattccttacccaactagaaggcagaaaatagtttctagagatctcagtaaagattttcacagatcctcctggtaagtccatgatagactagcctctcagaaaagtcagagctttcttcctccagacattcaccatctccaatttcccatttttcttttaagttccaggaccctggcatcaacatctcctctttctgggcctgtaaattatcttcctgtagctctgacagtgcctgggtacttaatggagcacacaagcagcttcgaaacagttacagtacatttttatttgatccttaccgcaggcctacaatgttggcagacacatcatctgcactacatctgtgaggctaggaagcagttggtggcctcctataagaaatccaagtcaaatgttgatgactgtcagagatcctatttaaatacagttacttgtcccaaatccactctcatgcacagcctttcttcaggaaacccatatcacttactgcatgcaaatcagtttgatctccagactatctccttcctgacaatatcaggcttgtgggtatgttttgtgctttccctggagatgacagagaggcatgcctgacccaggtcctattgctccatgattgccaataagaaaagatttctctagatgggtgctcatttgtgttataccactccaaatatatttccatctcccacctctctttccatctcccactaagttacctgtaaatattttttttcttcttctatggacccttctattctggaggctatatggttgtctttgatcttcagaggaattcaccacaaaggaaacatttgtggaaatgctggccaggcacatttgtatggtcaatggcttgtgtttagaaatctttctgaacagcctgtaaagggatacttgtcactgtcactgcaaactcccaggagtctatctgctggggtgaggatgctaagtccttcactgctgactcactccagaaagtttctccctatgatcttgatcaacctatagatactgatctagtttaagacattaggaaacatcccccctaccaaattgtatgcttgcaggtctttcttagacctttgacaacttaaaagtcaagattctctacttttgtctctgtgttccctaatattcctattcaaaagagttggaggagttgagtgggcgaagtttaactctacggcccagagatgggaggtggggaaagaaatgcctttaaggtgaaattgaaatacacaatgtggccggtgttgtgtcgcacacctttaatcccagcactcaggagacagaggcaggtggatctctgtgagttccaagcgagcctggtctccataatgagttccaggacaggctccaaagcaatacagagaaaccctgtcttgaaaaaacaaaaacaaacaaacaaaagaaatatacaatttggtaggggggaaagaatatttattttctttttctgatctgtttctctacccttcctcttgttttataatttcctgattacatcacagaaggactgagtcatgagactgtctcatattgaataatcattgctaaattatttatttctaatcaaacaggaataaataaatgccacagccagtattcattctatacatatcctttaaatcattggaacatataaatagggggccttaagcttaagaagttgtcattccacccctataataagaaagaaaaaggcagacgatcagtaaacaaaattttctttgtctcatcatagaagtgaagttgcaggccaaattctgacctgaacatttggtgagacactttatccagagagatacagctgatcttacccagagccacagacactgcagccataagtaggaatagttaactgtaatgttgatgaattgctgcaggcagagcacagaccaacttgaaagtgagaaaaccctgggggttatgatgtagcaggagctgacacacatttttgaggtttgcatacagaaaccccacaagattctcttgataaagattcaggaaccatctttattctggcaggagaaagaattaatcattttgaaatatagccagctggttcttcagagcaaaggcctgcattttatttcacagagagcaatactgccagagccttatctcagctcagagaaggaaacttctcctctgcccagtcacctgaatccttcccatctccacaaagctggaaggataggcagcaagggtcaggactccagataaactaatgaggaattttcaggcatgagagaaattagattactagaagaaaataattctacttctggagaaacacatatgacagtcacagacccaaaacatggagcaacccaaaataatcaaacaggaagataatagaacatctttcacccaattcatctcccccctctctctctccctctttctctctctctctctctctctctctctctctctctctctctctctctctctctctctctctctctctctctctgtgtgtgtgtgtgtgtattcatgtctatacatttttgtctgtgtatgtgcatacactctgtgcacaaacatttggaggccaggtgttgatgtcaagtgtctttctcagttactccccattttttttgttttgagacagtaggtctcttactgaacctgaagctgaatgatttaagtagattggctggccaggaggcaccagggattcacctgtctctaccttgacagcactggaattacagatgtgcactgctgcctctgatgtttcgtgtgatttctggagattcaaactcatcttcatgctcacccagcaagcactttactaatgagccatctctttcaagtatatcttgtactttgaccttgatcattcatctttacctcacctgtcaccctttcctaatgtccttctttgttccaggtagcccctcttctatcattccagctataatggaaacagcgcgacactttgccttctgtgtatggcttatttcacttaacatgatgatttcaagttccaccattttcctgaaaatagcataatttcagaacaacaccatgctggcacaaacagacatgtagagaaatggaatcaaataggaggcccagaagataaactcactgctactaccacatgacttttgacaaatatgccaaaaacacaactgacggccctcttagcaaatgaggctaagaaactagatatgcacatgcagaagaatgaaactagactcttatacctccatattattattctacatatatacacacacacatatatatatgtgtattcatagatgtaattcaaaatggatcagagatcttctttgtttctttgttttttttcaatataatatttttattgattatttaggagtttcacataatgcaccctcatcacatttaccacccagtctccctaggtccacttcctttcccttgtgaactacccaaagaaaagaagaatgaaaaaaatatactaagtctgatttgtgttgcccacatactcactggagcatggtcaaacttccagtggctagccccttaaagaaaattgagttcttctccacctgcacctctgccagaagcttcaactgtgaagagctacatttcaggatccctatcacaatttttaggagttctcttcaatggcttcctatctagactgatttgggtgttgtcacaagagccttctctatgactctcattctcaactttgagtccgcaggcatcaataacactgaaaaggaagcacccttacccattacattcaccagcagcatggagcatggatttccacatgctttctggtggcagtacagaccatagacatcagtggatccctttccctcagcaaggacatcagacacaatcatagctcttggcagcagtgcaggccactgacgccaatatgacttcagacagtagcacagaccatggagatccatatgatcctcaacagcagcaggggcaacagacctcaatatggtctctggcagcagaacagacatgggcatcaacatggcctttggtagtaacatggaccatgaatatcaacatggcttcaagtggtagacagaccacaaacatccacacagggcagcagtaccatgagcaccaatgtggcctcaggcaatagtacaagccacatacatcaacatggcccccagcagaatcaggaaccatggacatccacatggcctttggtgtcaactcgggccacagacaccttaatataagacctgaaactttgaaagtgttagaaggaaacagagaaaccactataaagatacatgcacaggcaaggacttaagaagaaaattctcattagctcagaaaataatagcaagaattgacaaatgaaattaatatattcagctgagtgaagagacagcctacagaatggaagggaactttttgccaagtatacatccaacagggcattaataagtgggatgtatgacgatctccctccattctttatgtgtctgcaggttcacagatcatcactgcagatctcagcagagagggccacaggatacagatactatgaggaggacggggaaaatgacaggaaaactgggcagcatgaagcctctgtcagtttctagccaagagaacctcaatccttacatcaaagtcctatttccaccactccatgtcacctgaaacaaaacgtgtggctgttgaccaaaaatcacaaggcatggtgaaaataaagcaaatattaaaagaaaaagaacaaaagatcatcagatcatcagactggatccagttatatcagataccagcattacctgcctggtcattctagtcaccatggaaactaaaactatgtttcaaaggatctaaaagaatgaattgatgacatatcaaaagtcacgggcaatctgagagtcggaaagcctaagaaaggaaaaaatgaagaaattctagaaatgaaaggtaacaaaatggaaaatgacttccatggattaattgtcagacccaacacagacaaggagggagccactgagctgtcaagtttgtcaataggaacatcccaaactgaaatataagaagaaaacaaatacataagaactaagggacacagaccaaacaaaaggaatagacaagcaagagaatggaaataatggacatcaagctaccaatcttgggctcttgcagaactccaagaagtgaaagtgtcaccatcacaaaagcaaaaacaaacagttggaaatcctgtgacttcagaatggtgctcagaacaaacaaccaagaggaaatctttaatgaagccatagggaggaaattgccttcctgatggagaacaaaggaagcattaacactgacttcttgtcagataccacataagagggaaggggagagatagagcaaagcatgtggagatatttgaagttcttaaagaaaaatctacccacatagaattctgtaaagagcaaagttattcttcaaatgtgaaaaggaaatactttctcagacaaaaacaaagtcaaacaaataaacaaaatccctaaaggaattcattgccaatagacctgccatttgagaaatgttaacgtagtttattattcatgaagagggaaataacataggtcagaaatctgtgtaaacaaaaagaaaaacataaaatagggaaggaagacatggacataaatgaaaatctcttttttcttttcttatgtataatcaacctaaaatataactgtttgttcaaaacaataaaagtaccatggctaggttagtgaaagaatgacagcagtatcaaaaggaataaaaaggaaggactgttctaaaatctataaacacgtgaagcagcatggtttgtctcgaacatggactgaaattaatttaaaatgcacatggtaaattctatggtaacaagattgttaatgaaaattggcatgctaaggaaattgaaacattttcagtgtataaaacactcacctccacaaaacacaaaatgagtaaaatctaattaatagaaaacaattataaatattatatctaacccaaacacatcgtagttaaaaggcatattgatggtatgggttaaaaaaatagtactgatcatgggcatggtggcacacttctttaatcctagaattcaggaggctgaggcagggagatctctgtaagtccaaggctatcctggtctacatagcaaacatcaggctagccaaagctatgtggtgagaccttgtttaaaaagaaaaacaggaaccacaggttctatctaaaaagaaatctattcagacagattagacataatgaaatggaaaaagatgtaccatgataacactagttcaaaagaagttactccaaccatttagattacagataagctgtattcagaaccagaaagacatagaagataaagtagactattatataatgatgaggtatgaatatgcaattctgcattgagaaaaaacatgttatttctgtaagaaaatgtaaaagtccatgtatttaatcaaaaaagcatcaaaacagatgaagcaaaaactgaactgaaaagacagagacacatggatcagagtggagccctgtaataccctctgtcagtaattcagatatttaatagacaaaatgtcagtaggaatggagaggaagtgaacagagctatccatcactttacctaattgacatttacagactaatccacccaacaatggtgaaataaacatccttctcaagtccagctgaaattcatcaagatgagagcattctgagccacaagccacacattagaaaatgcaagaaactagaaactacatatatattctcagatcattgtgaaattaaatcagaattcagtaaaggaggatgactaaaaaattctaaaccattttggaagttctcaataatccatgggttaaagaagtctggggggaaaagggttgttttgcgacaaggtctcgctatttatcccaagttgtcttcaaattctgtctttcagcccagcgtacccacatgctggagttacagtggtacatcgccacaccagccaaggacattttttaaaaattattctgaactgatgaccatggagatacaatttatcagaagtagggggacacaggagaaagtggtacatgaaataaaacagagagccttcaatttataatatagaaagaagaaatatctgccatcaataacccaatccttgtcttaggaaatatgagcaaattaagctttaattaaacagaagaaagagaaatattagagtataaatcaacaaaattacaataagaaaaaacaataatgaaaatcaacaaagcctaaggctgattctctgagaagatctataaaattgataaacaactgggcagcctcactgtgaagaagaaaataaagaaggaaattagcaattccttgaatgaaagggtcaaactactgacactttcatgaccgtgatagactgtgatgggatttccatgcctagaaatttggtaacttagctgcaacaggtggattccttggaagattcaaaatacctcaactcattacctgaaaaagaaacttcagccaggcctaaaggctctaatcgcagcactcaggaagcagggagaggagaacctgaagtcccaggccaacctgggccacccagttacaacccacttaaaaaaaaaaaaaaagaaagaaagaaagaaaaaaaaagaaaaatctgaggattgtagcatggtcctgcattataagcatttggagggagaaggcaggaagatcaggagttcaagatcagcctctgcctcatagactgaagggcagcatgggctgtatgagaccttctcacagtaaacaaataaaaagagagacgaagaaaagaaaactcatgctcgtataaactgatgcaggagaatcccttaactaaccaccatcattcacaatttttcaccaagttagaatagaaagaactatctcaactttatttttaaaaaatttaacacaattgcctggcatcatatttaatgttgagaaacaggtcgtttaccttccatgatcacgagcaaggaagccgcatgcttctgaaatgcccttatggtgaagtaaggcaaggggaaaagcacggatacgggcaagctgtagctttgttcctgattgaaatgactttatttaacacacctgcaaggaatttctaaaaccagcaagcaaggatggtgatggcacagaatatgggggcaaaacacaaagccagatcagctggcttactaacaataagaaggtagaagttaaattttaaaaaatgtaaaaaaataccaaaataataaaatggaaattcaaaatgtttagcatgaattcttttatagaaaacactgatacacaggttgcattaacactgatatttgcatcagcctaggatacttaatgataacatgtattgaaacaataaataaataaatctttatggctataaaaatcagtctatggaactgagaagaaatcctagttgattaaacagaatgaccggtgttctctgcctcttggtttaaagacttattattaagaaatcaaagcaaattgcatagtaattaagtgtttggttattcaatactgactacttggcaagaaaaatattttttatgagaagacttatgacttctatttagtttaattctaaatgtctgtaaatcaaaagacacttcttaaagccttggtacatctcaaatagggctaagggtgctgaaagacctacaaacagcaaattattgacaacaagattgtataaagaatttataaaacccacagaaacagctgacttgaacaagggaaaactcttggtccccagactgatagctgggaaaccagcatgggactgatccagaccccctgaatgtgggtgtcagtgaggaaaccttggaaatctacggggccccttgtagtggatcagtacttatcagtagcataggaatggactttgggagcccatcccacatggagggatactccctgagcctagactcaagggggttggcctaggccttatccccaaaggatatgacagactttgaagactccctatggaaggcttcacccttcctagggagcagaaagggtatggcattagttaggggagcaggggaggagaggagggagagggacctgggattgatatgtaaaataattttctttctaataaaaaaagaaattacccacttgaaaaaatttttaaatgtatcataaaagaaaatttatcacagtagaaatatgaaaggccaagagacagttcagaaataaattctcagaaaaatagctagctaattaaaaatacaatgaagtcaggcaggttaggttaggtggcacatgcctttaatccaagcactggggatgcagaggcaggcgatctctgtaagttcccgagaccagtctggtttacaagagctagttccaggacaggctccacagccacagagaaaccctgtctaaaaaaaaaaatacaatgaagtctattcatatccacaaaagctataaaaattaaaagtctaacaatattgaacaaagtatagtgatttaaaaacccctcatgtcgatcaaacaggagcattgtcaaagaacatgagatcagtaaattcattgccttttaagttttaaaatggttttgcaaactagtgatgattcatagaattaataaatattttaacaaaataagtatgacattttcataaatcctgcttcacaatgctacgcatgaatattttctgtatatatcaaacagtaggacaaagaaataagtaaaaacttcaaccttttactttaaaagcagtatactgagttttttagtgaatatagccaaagtagtctacactattatagaaactatctttctaatatttaagctgtctgctaatttatcaactgtgagagactcaaaaatatgtcacatgtttttatattttacattttaaattagtaatattttgtctaaagttaaatatccctttgggatttttctctaaattattagttatttgtatcaaccaattcaggtaaaataaaacaaaggaattcttgctttttctcaacatttggaaaaaataagtctttgatgttgttagaatagttttaaccttatgactaattattagtttaattcaaggttttatttttttataaaattgcacattgttgaccttgcttttttttctaagaaaactttatatggaaatatgaagttgtaaaatagtgcagctcacacctttcttagagttagagttttgttgacataaccagagcttcatatgcccttgcaagaaatattgcagagaatatagaggaatcccatggaagcttcaccagagagagagagagagagagagagagagagagagagagagagagagagagagacatatagaaaactattgtgtggtatctcaaccagagtattgacatttattttgataaacaatttaaagacatacctattaccacaaggatcctttgtgttcaacatttgaaaccatacccactttcctaccatccatactcttaaccaatgacaaatattggcttcttcccactttgtacaattaccttgtttctaggttgttacacaaacaatcaaagttcaacatccttccttgggtttatctgtcatatgaatatactcttcattgaagggtttacctagcttaccaaacctaattctaatttgaatttttcatttttaaattttagaaccccgacacatacataatttttaggtatatcttctaacatagtcaccactgaccgcgataccagtctcctgagaatcctttatacagtttagatgctggtcctcaggtctctggtatgcatttcctcgaagcttagactgttttttttttatcctgttaacggattttccataaagtcgagtcttcattttgctaaaatccaatttatcatcttccctttgtgaatcatatttcactacccattcaaagaattctttctagaattagaccctaaatattttctctcatttttgtcttaaaagtttgtagctgtgtgtcttgtatttgcctcgatgtctcattatgattctcattttttatttaagaaatgagacttacattgaactcttttttttgccaacaaatctctagtatcccaggactagttgttaaagtggattgtcatttttttgcactgagtagcttcttagattttgccaaaaagaaatgggacacagacatggacacacgaacacacacacacacacacacacacacacacacacacatacacacacacacagagagagagagagagagagagttctccattatgttcttctttttcttttccaagatcctttcttcaaatcacttatttttaactctgtttccatctatgttgcatccatacagtgaagattttccagttctggactgcccatctggatctgctacttaccttccccctttttcctgaccctcttgttcctctgtgcatgtaaagcatgctcacaactgctcctgaaccccagggctttaaaccctctgctggccaattctcacatgtatgccttcttgtaattggactccattctggctttcactgcccactttgaaagcatggtggttctgaatcaagcacatcaagtttcattgaaacagggtattttgtgttatgctgtgagatttgtagtcaggtttaagtgttctgggttaggctgcttttctttctgatacctcaaatcatgggagatgcctccttggttcatgtagtctcccacatatagaaggtttagtcggttccctggagtctccacagttgtgggtcaagagttcatgagtttccacgagtttggttcagctgtctctgtagagttcttcaacatgatcctgacctcccttgctcatatattccttgccccctctccttgactggatccccagagcttgacttggtgcttggttgtggatctctgcatcttgttccatcgaatattggatgaaggctctaagatgatagttggggtattcaccaatctgattagaggggtaagccagtacagctatcctctctgctattgctaggagttttagttggggtcatccttgtggattcctggtcgaggggagaaagatggagtggaacagcaataaaagagatatcttaatagagagaaccactatggggtcagcaagaaatttggtgctaggaactcacttcttatgctcagtttaagaatagagatatgcatgaaatctgctgaatatctcaatcatttgttcattttagatatccaatggcattccttctatgaatgaaactctttcatttgtttttttaatccatgaaagagatatgcattgtctttatttgggagcagttataaaaagagctgctataagcaatctgtcagagtttctgtagacatcagtttcaatccatttggttaaatagcaaggaatgagcatacatttcatttcataggaagctaccaactgttttccagattggatacaccatttttccatgaaaataaattaattctagtttctctgcaccagttgttatagcaatttatttttaagttgagatggggttcctttgtatagccttggctgtcctggaactagttctgtagaccaggatggcctcgaatttacagagctggaattaaaggagtgtgccactaccacccaacttccttccttttttggcttctctgatatatatgtagttttctacagaagcttaactcaatctttctctaaggcataataacattggaaggcttttcatgtgttaatttgccatccttgtgtttctgaggcagaacatatattcaaatattttatcatcttcaacttgactgtctatttttgaatattgagaatcattgtattttgtatacaagtctattgtcaaatatataatttgaaaatatcttttctagtctaatggtagcttttattctctttataattgttttcacaaaacaaaagtttcaattctgatgaagtgtcaatttcccctttctggttgtgcttttgttgttatttctaaaaacttttcaattccagtttaggaagattttatggtaaacaatatatagattacgatttaatatcaattttagatgcactttgttttcaacatatagatatctacttgtcaaagaatccttgctgaaacattatctccttcccaactaaattgtctatgcagcttcatcaaaaccaaccatgcatatctgtgtataatgggatgatcctacttaggaatattctgtcccttctaagattgccttccctttgtacctttgtattgactaatgttggtcccctagaatttatctttctcttattcacttatttctaggaattttagcaacaataatttcattcataggttctgttgtcttcagtcttcttgaaagtgggatggaatatccctgaggctagttactctccactacacaggagcagagatgtatgtgtttattctgactgagccctcaggatgcctagttatcctgcagccatcttctagacattacaattgggaggagaaaacaagctgtttctccaactctcctctttaacctttatcccctataagatccttccctgaagttttctcacataaatggctcttgtggtcctttgaccctaacaaatctgagggtaaggaagtacaggagccttactccgagaattcatactgcacttggagtacaattccatctttaaaaatgtcaacagccatgagagactgcaattctagggtattgattgaaaattccaaaataatccatttatttcatattacaatctattttgggtgacttaatgaaaccttgagccagtctcagttatccagccttacacttgagtcccctgtttgtccagtgttcccatgccttggatacattattcacttggttgttatctccattttcatatcgattgtgggcacactacagtcttaatgcttaaataacttttagttattccatatatgtctcgaacacacacaaaaacttttatgctgcaaattcagatatggaacagagacaccataggagtttcaattaagtaaagagatggaagttcctaagtgagaaaggaaaaatatgcaagctgaagttgctaagatctgcaataagaaggagtcttttaactgtgaaattgtgaaaaaggaaagaaattcatgcctgcataattattgcacctcagagcgaaaacttgcagtcacagaaaaatcacagatgcatagttgttatggaaaagacatcaactcatgtggcatgtgtgtgtgtgtgtgtgtgtgtgtgtgtgtgtgtgtgtgtgtgtgtgtgtgtgtctgtgtgtctgtgtgtgtgtgtactcaagtgcatatactttctcctgtgtggtgcataggcacacatgtataaatgagtgagtgagtgtaaaaaaaaataataattgaatggagtttgggaatccatgagacttgagatgcagagctaccccttggaataagacggggctccagtaaattttattttaaaagttaaatcaaagctacttgcatcaaaaatggcatagaaggaagcagcagaaatgattgatcactcattctcagcacaagatgattcatatagctatgaaataagagtaggctgcattgtgaacttgagtttgggatgattcagacttcaagtggaaatactcaacagaaagttagaaacatgggagagacaacatagaggaaacattgagactgggtgatctctgagagagaaaagcaaaggactaaggactgaaacaggaaattactaagtagcactcaagtgtgtggctgaagagcatgaaggaagtatgtcaaagtaaataggaaagagctcattgaaagaagccaagagctttcttctactccaagtattaaattaatttaatgtagcaaaggttatgttaattgctacactttgtttgcagttgttcttgtattttctctgctcacagcatctattggcctcgtgttaccctatcttctgaataaagaagaaatttttttctattctctggggtctgagaaagacaaacaatgaagttttacactagaaaatttagcataaaataaaacatacaggaagggattcataaattattaaaatctatatggactttactaagtatgtttatatgatttttttcttctactactattgagttggcatagaaaggtcacaatttgttaacatacccaaagatttttttaacagtactacagatttcataacatatttaacatatgcaaaatattctttcatgggtgtatctatatttacttagtcaatcacagatttttttaatatatgaattgccagctgaatatttttatataaaaatagtcatagaatattgtacctcccagtttttaagagaatccattattattcaattgtgtatgaaacttatttactgttaacctcaacgtcttttgggcacataaactcttcctgcaaagttcttaccacgtacaaaaatggtccaacaactctgcttctgggtaatgaacacaaatctgtggttaatccttctcctttggtgcattcgtcccaaatctctcttctaataactccgttctttattttttttttcctcttgaagcatcccaattacattcagtcattttttttactatgaagttcactgggtttggtttttactggtagaccacgtagccaggagagaagagcaagtgtcattatgagatccaggtatttggatcaatgagctgtttgcgtggggtgttagttacatcgaggcttttctgatgttttcccttaggatgtactacttctaataaaatgtgcactcatgaacagggatatgcagactacaaagcagacagtcataattatatggtaaaaatgtattgattaataattataacatctctttaaacgaggcatttttaagaaaataaataaaggtgtttattttctgcaaatattgtggtttacaaaggaaggtgtggattttctctacaaatatctatctctctctgcttcttgtcctgtgctttaccagacttcagtttttgcctcccttgtcattcagtctctaaattctggtactgctcttcagttggggcctgctgtgaatcaatgggcatgaggcatggggctgatctactacaaaggcctatgctacaagtgagtcactcagtcttacaggtttaaaacagacctgactgacactaggcagctccctagtcagtagttaatctcatgcaggtagacatactaaaataccgactacggctccaagactaattagtacattagctaaaattccggaagaaatgagaaagaatcattcggtgggataagaaaaactggcataattttaggatttaattttaaagttgttttgaaatcacaaaacaaaggcatgaggaagaaatggcaaatgcaagaacagaagccacagttctaatacatccactgtaatctagccacagtgatgtcaccagcaggggatggagacatggtatcaagtccttttttaccagatgacttatgctaacatcatttccattattgtgaatgtttctattttttgttttgtgaactgatctcattgtttatcctaggtgggcttagaaatcattatgtatgctagggtgaccctgaactcatgaaaaccttcctgcctcagtctcctgaatcctaggattgcatgtgtgagctactataccaggctccatccgaatatttgcatgacctttgtcctgtgcatttccctggactaagttttgacatatttttcataaagctatataccacaggctaaaaccttcagtcaacttcacaagcaataagatgcctgacatggttctcccctctgccaccaacctcttatcctgtcactttcatgactcagaccctccagccacaatcccttccttctgggtttcaataattagaaacttaaccccagctttggcttttcaacttcccacactgtcttgtcaaacttgcttccacccccagattggacaatggtaatctgtaaaccaaatctgatctctcactcccagctggctttgtacatcgggttttatggtacatcatcacccaattcctttgtatactgtcactagccctttcacactacagttgcagggctgaatggtacagattgagaagttttgaatatttactatctggacttccataggaggaaaaagttgttatatccaaataagtgcccccagatcagagactagctgcttctgccggttatcataagacaatctcatcacagctgtacaatgaaaggagatgctttctgtcaccacacagtatgaagtatttcattttacacagaacattgtatcaccctacattgatgtcccttatttaccatttgcttgtttatctgactcttatatgtgcgttgaggttcataacattcagtgtaacacttcagaattagtgacaaaatacctcttgagaaatactttttgtaaatgattccagtaattgaatacatggattttgctgctcaaaaactcatgatgtccccattacattatgattcttccactagcaactgcaaagaacaaccaacattgaaatagaacagcaataagaattagtcttgctcagttcttcagatctcttttatatacagttataatgactattttcatgctttctagtgtttctgtacccaagatacttggcttaaagctactattgtgttacagttggtgtcctgggctggagaagatggctcattggtttaaaaaaaaaaacactggaccactgctcttccagaggacctaggttcaattcccagcacccaaatggccgttcacaaaggtctacaattcaagttctagaggattcaacccttttttacttccttggacaccagtcaagcacaaattgcatataagtacaagtagaaaaaataatcaaacacataaactaaattgtttaaagagagagagagtttgtgtcctcccaaattttacaggttgggacattatacccaatctgataatattaagaagtaggctctatggaagatgactgcataatgagaaatccactctgatgaatgagatgttcataaaaatagtttaataagctctcttgccccctcagtcatataaggacacagaatcttctttgagattaaaccctcatcaaacaccctatagttttcagactgtgaacaatgaatttcacaggctcaggtattttattatagcatcttaagtggactaaggcaaaatattacagacaagataattgcccatgatcatgatgaagccgggtacaaagacagtgaagttgtggtaacatggagaaaagagcatcacatcctgaagtctacttgaagcctcatatcaaccagaataaaaaaaaatacaacacaatcaacaacatttgctatgaaagttgacaacacaaaacaatattccttcatatatatatatatatatatatatatatatatatatatatatcagatgggtagacagatgaaagagacagattgttgtggaatatttgcttacactgtaaagatgtatctctgcataaggtaccttctgattggtttaataaagagctaatggcccaatagctaggtaggagagaataagtggaacttccagggagagaaaggactgtgggaggaagagaggcagagacaccagcaagatgcagaacaaattggacatacggtacatacatacatacattaatagaaacacattaatttaagttttaagagctagttggggaaaaacctaagctaaggccaaccttttataattagcaagtctctatgtccttatttgtgtgctggtggccctaatacaagaaatatttcattttaaatttgcaatgaatcttgcttaagacctgaatgcatatgcattgaataggaactcattccttcccccaaaacattgcttaaccatctcaaattgcctaagcataaggtaaacaaaggtatcaataatagacatgtcaaagttgaaagagaaaagcccagaaagcctcaaccctacacaaaggactgcaagcaactaagaaatgctgagaaaaatactcttcagagatgaccaactggctgtccaacagcaccctgaggatgtgcgtgcaagcagcattgttcagactgagtgagttatgcttgggtatacatgtgtatatgcatatacatatatgcatgtcacaacaattaaaggctattaatttgaaagagaacaagcgggtatctaggaaggtttggagagaagaaagttcaggcgaaaatgatacatgataactgcaaaaataacagaaggaaaacaggtgaattttgtttataataagaatatccaatgcttgtgtccctgtgagccagattttatcttatcaattataattttgtctgatgcaccacaggaaaaaacctggttccttagcagccatttgaacattagtaacttcaaatcacaccaaaatcttatatatgacttgtatggagaaaaaaatccataaagtgtgactctcactgagagaagcccatactcatgcttgtaggtgtcttatttttctccctggatgcctaccctcgtgcttaagcctattcaagtcctgtgtgtgtgtgtgtgtgtgtgtgtgtgtgtgtgtgtgtgtgtgtgtgtgtgtgtgtctgtatgtgtgtgtgtgcaaatgtacatttctatgcattctgagaccagaggacatagggtgtcctgctctatcactctacaccttattcttttgagcctgggtttcttgctgagcctggagcctaggctggcaaccaggaagcccacagtgatcctcttatctctacaaagttccctcccatctctagacttcagacatttgtgcagccatgtcagctttttttctttattacaatactgctggctaattgactaggatttcttttatgctagctcagtcttaattatcataaatgtatatattttataagacttatcttaccaaggaccccttctgctggtcctcttcctgggatcacatggcggctctgtagaaaggagagccggaggaagagaaagagatagagcatgacttcctgcttgtccttgcttaaattctgaatctgcctgctatgtcacttcctgcctggatcaccagacttctcagaattctcctaaactcctagtctcacgtatcttgctccccctattgactaacagtgatttattcaacaaccaataagataaacatatacacagaaggacctccccatcatctcctcttttctttctaaataaaaagaagggtaacttatcttttataataactgaaaaaattatagctataactatctgtcttcaactccatcaaagaccacagaaggataatatataaactctagaattgacagagacatcctgctacctggagagtcacccaaagttcctctgtaccgttggggcatccatcttcagcctataggccatagtgtgtctagcacacttctccatttcagcaggaacccttcaggactgttcatcttgttttgtaagttcagcagtcactttttgtgggtcctgcatgtccactttatagagcaacaaacagtccaggcaagagcagtttcttgtccaaatggctaatcttgccatgttgaaggcaaactccataatgagtttcttcgatgcccatccccctttctgacataattgacgtgctaggaatagttgtgtctcactgtcaagaaaagccctaaaccatttcaatatcatatattctgttggtctttgaagggtttgaaaatatctatccatctcaaatgcatctctgtatagctagaaaacctaactaacctaattaaaagtttcatttaaatggagttggttataaatggtaatgattacagtcaatctccttttaaaagaaaaaaaaggaataggatatggagatgaataatttacattggtatggattttcatttattgatacaaccttaaggtcaattttgtgatatgtaaatttctcctcttgttcaggtattgtgtttatacagatcttttaaaatgtaatgcataattaaatatagattatatagtcacctatagtagccatgccagctttttacatgagtgatgagaggtctgacctcaggtccttgtgcatagatagcaagcattcctctccaatgagccatttccatggctcatacaatacatttattaaactccaactctactactgactgctactgtgttagttacctctttctattgttgtgataaagcaccatggacaaaacaacttatagaagcaaaaggttgtttgctcttacagttccagcaggtcaagttcatggtggcagagggggaacatgaaaacacatcttgaacagaaagcacaagcagggtcattaaacttgaaatgacccatgtctttgaaacctcaaagcctgacactaatggcatactccaccagcaaggccacaccttctaaacctatgcaaacagtgccgccaactagggaccaagtatacaaacatctgatcctactggggaaattctcatctgagatagtttctgtgctgaagccacaagttgcaatttggctagtgtcaatgttcctaactctccgggctgctgaagtcgatatgtagacctttgcctcctgcctctgtcccccacaatgctgacactgacaatcttcctcttttatattttatttatcttaagttttatttcataatcctttcttttgctatctaagtaaagaactggtagtaagttgggtcagcccatccctgagaaagtgcatcccaaaagcctattggtttcctttagatcatcattaaaaaataagatacgtaaagcccttggtaagcctaattgctaacaatagctcttagttatccctaaatatgtaatgtactattaagtaagtcttgcttggggtcagactggctctaattagttcagacatccgcaatttatagagctgtgaactaggaagtaggattagatcatcccaataataagaaaccctgtgctttacaatgactttcaggtagcaagcatatggagtgtaagaggctgagatcacattgatggaattagtgctgcttgtattttgtgaaaaattcttaatattttgagccttagtttactgtttaaaaataatggtgcccttctcttctgtagctaggaattacagtgcactaattgcatgtaaagcacttagagctgtaccttgctaatagatggaaaacacttagaatgtgctgtagtttcgatatatttatggaagtaagacactattacattgttatatttttatgaagctattatgctaggaaatgggacatactagagataaatttcagagaactgggagggcagaggaaagctgataacatgagccaacaaatgagctcatgcacccaaaattagcatggatttccaacatgaactatggcctatcaaaaaaaaaaacttgttctcagggggactattatcaaggatctattattaaggagctctgcgtagtaggatagagaagaaaaatatgagtggccctattcctttgagctgataaacagcttttgatacttgaactcacaatgaaatctgccttcttagaaataagattttgaaaggaaggtgtaagttgcaggtaggccacatcagtcaaaacttgataacaaggtggctatctcatgttaagaagacttagagcatggtaaacctttaccattttttttatatttaccaaatttcatagtactgaaaacctttactttccaaacatatccaatttattctgtgtaatgaaatgaataaaatcatattcacccaaattcctctcagggagactttgtatttattcaaaaggaattactttctttggagtatgagaccctaaggaaatgctcaagtaacacaatatagcaattaaattgttctgcctaatgaagggataaaggattttaacaagagagtaacttagaaagggaaaaagggggccaagtgaggcaggaagatactgggggattggaagggagaagcaggaaggacatggagaagctcttggcttagtaacagagaggtgtaagaaaacattaaaatgtctaattgtagttcacatgcttgctctgagcctgcagaaggaagccctttgtctctcgtccctaagagattggaggatgtatttgtgttgctcacttgtattgattattttgaagaccagatgagatgctgagttgtgtgttcaggtggatccaaggataaaagagactattgcagacactcataactcagagagcagagcaaaaaagctatccaagtcagagagccatatttctttagaacttctcataatgtttttaatgaagctttaaaagtgtctcatctgtactataatgtagaaaattaagaccagagagataagaaaatccacagcgcaatagaagtgctcacaagggggagacagaaacttagaaggtagcacttaggaaatagttctgcagccttctcaacaccattccccctccagaaacatagtttaaagcttattcattagtgaatgctatcctttttaaaaattgatgatactgttattcaaaagaaatataatgaaaatcacatatgtaaccattcacatggtaacagaattttcaatatgtggacataaggaagtaaaatttaattttaataatgtattttatttaagccaatatttctaaagtatcatttcatcatgtaattagaatattattatcaatgagaaactttaatttcttaaactacctttagaatcccatgctacttttacatttgtagcatgctcaattccaactgacctcattttaacttctctatcccaccatgctacaaagtatgtatcgaaggggtcaacctttaagcagtgattacccaaaaaagcaaaagtggttttcaattgtacaaagtgactacgaatccatgtttataatattagttttatgtttacatttgtaaatttggtactcttggataatggagagtttaaggaggaataccaaagagctgctgagcactaactacaagtggctatagaaatctatgtccacaaatcatcagacacttactcatttttaaaacacctttctttaatttgatgaaggatcactactgaaatggaacatatggagttgtgcccaatatccacttcattcttccagtttgtctttctgaagggtagagactggaaaaccaaaatctgttatttctgtctctgtctctgtctctgtctctgtctctctctctctctctgtgtgtgtgtgtgtgtctatctgtctgtctctctctgtctctgtgtgtgtgtctctctctgtctctctgtctatctctctgtctgtctctctgtctctccgtctgtctctccatctgtctctctgtctgtctgtctgtctctctctctgtctctctctctctctctctctctctctctctctctctctctctctctctctctctccttctgtactgtctatggatccagatgtagaaatttcaactcctctcaagcactaggtctagctgcaggtcaccctgacccctctggttattcaataatgggtctcaagtaagtatggcactgttcatcaaggtaactaaataaaatctggctgtaagttattatatgggactttttccataaaatggaatggccaacaattctttcccataaaacaaaattatattagactttgcattatatgctgacagcatcttatcatatctgaggagggaagccagaccctccttgcagcaaaatgctctgctggtaaaatcaaacactatacaattcagaagcagccttctagatggagtattgaaatggccttctaaaaatatattgaagaataaactcagaatcaatcctttctcagaacacgatgcttctcttccagaatgcagtgtgggtgctgggttggggacttctatatagtgctttgtccacagtaggaaaaatcatggtttgagaacaggagtgtaaacagtagtagccccactcatcatctttttcagtcgcccctgggatgtatttgtgcttactgtctggtgattctggactgtgtatcattggataccccgatccccaaaaggtacacacaaggcagaccgtacattgaaggtgggattgagttgcaagctagactgccacttgcatgttttggcatacttatgtctatgggcccaggagtgagaataagatctatcctgttgatcaggctgataagcattgatttgtaggaagccatgaaacaatatgtgtgatacctagtgttctatttagccttgtttcatccattccctttcatagttaaactaacagttgtgtacttctttaacttttatatccatcttatgttctgctccttgaaggactcaagtaaaacacgtgaaaattaattatttatttttcatatgttttatggtaaaagatcataagcaaacacattaaaacattatttctaatgtaataacacaggacaggggaataatgagtgatatgtgtgtcattatttatagcttgggttggtaaatcttcttaaggagagcatcaatatgagcatattcagacataacaacaatatatgagctgtgcaaaccaatgcttgaagagattaaggaagttaacttttaaaaatcttttttatagtgatttttaaattaaattagaaacaatcttgttttacatgtgaatcccagttccctcttcctcccttcctcccctgccctccactaacccccctatcccatcccctttctgctcctcaggaagggtgaggcctttcataggggatcttaaaagtctgtcatatcatttggagcagggcctaggcccttgcccatgtgtctaggctgagagagtatctctctatgtggaatggactcccaaagtccattcgtatgctagggataaatactgatccaccaccagaagccccatagattgcccaggcctcctaactgacaacgacgttcaggaggtctggatcagtcctatgctgatttcccagctatcattctgggggccaagagttcccccttgttcaggtcagctgtttctgtgggtttctccagtctggtcttgacccctttgctcatcattcctccctctctgcaactggaaaggaagctaacttttatctcctttcacaatcgccaccgtggctgctccacaccaccaacattgactctgtttactctgtttaataacaatagatatgtcaaccttgataggggaaagaccacaaaattcaaccaagaaatgctgagagtggtagaaatacttatcctcagggaatagtataccaagtggttatccaatgccaaatggtcagtattgaaaacatacatacaagtaacattgtacacacagagcaggttgtatttaggaatatatatgaaaatgaatacatgtatgtaacaacaattaattaaatagacaccatggattttaaagagagcaagaagaagtatatggcagggtttggagaggggaaatgatataattatattacaatctcaaaattagaagaagtaattaaaaagaataatgacctggtgtcctacttaacaggaatagcaagacatcagattgtttgataggaaaaattctttcaaatccctttccttaattttattgcctgagaccctctctttggaagaggagtctgctctcgtggccaacactaatctttccatttgtaactgaagacaagcagagtagtggtgttctcaactgccatgagaaaaattatgcatttctgcctccagggaacactgccattttcaaagtatgaatcagaaattgctgatgcttcataaaataagacagatgaatctcagtgccatattgccaaaggccatgctcagtagagtgttccttaatttatcatttagtgagtacctgcttgtatgtcttgtgttagcagtaataatagaaagatagccaggaccccaaatttccagccagctgtctcttgctatggattcttaatggggagtttaatacgtagacaatgctctgaaaaattgtatacagttgtccccaaatatagtacagtgttttacttcaatgaccaaggttggctcacatgtgttgcctaaaatgtccttcatattgtccaatggggtatagatttaaagacttatgtcaatctctttgacattttaccatgtccactccaggaatatgaccaaatggagtatttgtttgtcaaaatagtaaaaagaagcccagaaagatgttcataagcacagaatttgtatttttctcaggcccagagtgtattgatccaaggagatcactccaggatttttcctctaattggtggccttcctggttttgatgacctcttccctggtagagggagctctgaagccaagccagaagaagtggtactactagtgccctagccttggaaatatgagagaaaacagcaacaattctgatgaccgtcctcaagaagcatagtaagatgtatccacttctctgtctcttcttcttgtgttttccacactaaaactcagaacttccctagaaattgactaactccttttattttcttcttaaactgataattcttactgctacacatttatcctgattttcatgacctattcaaaaataacatatagtaaataattgagaaattatcacatttaaatatagtgttttctatgtccaaaaactctggcaatgctcttacacagtgtaaacactgaatagttgtctccccacatatgccccactcatggcttgccactttgatttcttctttatgcacactacttcatgcctatttcagaaattatgatttcctgtcactgcagatattatttttaaaaaactttaggagtcacatcaatgcgccttaaaaaaatcattctccacttcacaattggatgaattatcctctttctcctatcaagagcaagtctgccacttgttcaaaacttaaattttgtactgtaaactttaaaatagtgctttcaagtgcataataacacacaatttgaaatatattcttaggcataatgtctgcaatgatcatcaagtaatagaaaaaaaatcgtgaagtaaatcagtagctaccaattccattctccagaagagaagtgtaatgcgtatttttgtgaatctgacatattccaacctttgtgttcactgcacttccctttaatccatctaccttgttgatgtctcaaagctgctttttgtgtattgtggcttctctggtcagagttggttgactaaggaaaatggatctgatctcagtgggatcactctggttccctcattaagaactacagaaactgagacagaaataaagatcttggaggagctaaaatacaggagcataaggtgagaaataaaaggtcataaatggtaactgaaaaatgcaaagatgctatccatatagagaaaacagtaacaatttgagacctttgacagaaaaaaattacctgtctggatgggacagggaagaattacatagatttgggggcggggattaccacaatttttgagagtcttaagcttctcaactccatgatgtaatttcttcctagaatggtctgaattcttgtccttgagcttcatggaaaaatagtataagttacaatgatttttcccttttccttgagctaagcctaattggtttctatatttgcaaccaacatgaaaaataagactcaaagtgattaaacttatccaagatcacattttctgatagtgaaaactgaaaaattaaaaccatagcccaggtcccctaacttatattatgatggattatggcatcccaggaatgtctgatcagatacaggcagtgaggacccagaggtttatgtaccaaaattggaaaagagaagatatctctctagttaaatagccaagatgactccaataggtttaatgataaacactcagcagtatagcctcacagaagtatgggatttgggggggggttgttattttttgcaaaggagttttgaaatgtaattggtacctcaattaagctcaattaagatgagtcttacatccaatggcaagaatttttacaagaaggggacatgaggaaaacatgctgagaagtccacatgaaaagaagatcaatatatctacaaaccaacctgcagccacgactgccagcagcagacagctaactatctagattttggaattatggccaccagaacagtggaagaatccatttctgctgctcaaaatcatcaatttgtgctgatggattataacattcataggaaactaatactatattaaaatataagttattatgaagggaatgaaaatatcagagaaagataacagtacttggggttgctactatacacataggaaaaactaagcattaagaaatcatgtaggccgggcgttggtggcgcccgcctttaatcccagcactcgggaggcagaggcaggcaaatctctgtgagttcgaggccagcctggtctccacagcgagtgccaggataagctccaaagctacacagagaaaccctgtctcgaaaaaaaaaaaaaaaaaaaaaaaaaaaaaaaaaaaaaaaaaaagaagaagtcatgtagtatttacttagcatcaactgaagttcaagagagacgtaccaactgaggaggcagaaaccagggccaggtattggccctaagaagccaatggttttaaatcaggactggctgagctgtttctaacccaggtgctgaaaagtaattcatattcttcagaatactattctgaatcatttgctgaagatttaccaggaatttgtttctttttcctgtcatggcttcgtcaggaaagatacaaaacatcttctccgccattccgtcatcagcctgaacagtatccttcatgtacctccacaggtctgttataaaggaagcagcgtggactctttctcaggaacatctttgcttaaagcagggaggcccaaagtgacttctgcaaatgttgctattttatgaaaacctctaatggaaagttcggagacacaggattcaaggagacaagtgggtgacacagctctaggctctttaatctcctgacaaagaaccaggagaggataaagcagattgataggaaccctcatcacagaggttcccaacctcacagtacttcataaacaaaataagcttaaaaatatatgaatacccatgtagaaaaaaaattgtggaaaaaaggaccagtttagactgtgctggaattagaatctgtgaaagcatcctttatttatagttggataagtagaccatgagaacatgagctttttctacttactttttttccactacaaaagaacctgtaccattttcagactaactaaattaacagttagttggttccattgctatttcaatgaaaattcagttttctgtatgtatagcttatgaataaggtgaacaatatatcttcattgttatttgatgtcaacatcttgagatgagtgagtaatacaagtatttgaagaaagaatgccccagaggaacacataataaaaagccaaggaaaagcctgtgaagatctcaggatgctattgctcctccttaccaaaaagaagcagagcatctatacattcaaatgtcctggtcccttactgttttgtgcttttaactggccatactataaaagttctccaaactcaaggacatatgttcaacaatgttcatagcagcattgtttgtaatagccagaatagcctggaagcaaccttaatgcccctcaacagaagaatggatagagaaaatgctgtacatttacacaatggagtactactcagcagaaaaaaaaagcaagggaatcttgaaatttacagacaaaccgatggaactagaagaaaccatcatgagtgaggtaacccagtcacaaataagacaaacatggtatgtactcactcatatgtggattttatacatagagcaaaggattactagcctacaatccacaccaccagaggaactaggagacaaggaggaccccaagagaagaatgcatggtcccccggagaaggggtaagagacaggatatcctgagctaattgggagtgtggggtaggggagagggatctgggaaaagagaggtggagaaatagaggggagaagggaaatgggggaggaggaaggttgagtcaggggaagaatagaggagaattatgatgaaagatatcataatagagggagccattataggttgaggagagatctgacactcgggagatttccagaggtctacaaggttgacaatctaagcaatagtggagaggctaccttaaatgctcttcccgaataatgaaattggtgactaccttatataccatcctagagctttcatccagtggctgatagaagcagaggcagacacccacagctaaacactgaactgaactctgaaacccagttgcagagagggaggagtgatgagcaaagaggtcaagactggtctggtgaaacccacagaaacagctgacctgaacaagggggagctcatggatccaagactgatagctgggataccagcatgggactgatccagacccctgaacatggatgtcagtgaggaggcctctgcactctctggagcctctggtagtagatcagtatttatccctggtgtatgaatggattttgggggcccatcccacaaggaggaatgttctctcagactggacacatgagggagggcctaggctctgcccagattatattacagactttggggatccccatgaagggccttaccctacctgtggagcaaaggggagatggggagggggctggtgggggagcagaggaggggagggagagggagctgggattgacatgtgaagtaggcttgtttctaatttgaactaataaattttaaaataattttttttaaaaaagttctccaaactctactcatcaaaggtctccacagaacaagcacagaagtggaacaacctcaggtcgttcccaagagctaggcatgaaacagttcatttctgtcaagaacttatctgcccacattttcatggggtgcataagcccagtaccccaaaagaaaccaataggggagagatatctgatcctttgatgagtgagaaatcgattaaagaaattaatttgatttagagaaatataacttcttctgttcctatagatgagcaaatcatttcaaaatttagtattatttgtggagaaccaatgttttaaatgttttaaagggatcttatgataccaaagatatcagaataatttcagaaaagttgaataatatctaataaagacatatcttcaatcttttgtagtcatttttcattgtctgtaataggaaataaaacaagtacaattcagaatgattcatccatagcttcaaaatagtgatctattattcatatataaattctttgttcatgtttagatcttctaaaagaacacttagaataagccctttaaaactccaccagtgttaaagccattgtgatagaatgagcagtctcctttgtaactatgaccactcctaacttctcccagacattctctccacaccagcagctcaccagagtagctcttgtctctgtatgctacaagagcaagccctgggcattctctaattatgtgctcagttattctgggccttgagatgaataaaagttgggtgtctttctggtgtccttctggttgctatattgtatattaaaatggtagcacctcccttttctgttgtcttctcattgttcaatcaagactatttttcaagacagggtttctctgtgtaacagctctggctgtcctggaactcactttgtagactaggctggcctcaaactcgcaaggctacacctgcctttgcctctcaagtgtagggattaaaagtgtgtgccaccatgcccagccaagcaagactatttttaaggtctaggaaatatgtggacttcagtgcacctaactcctcaatccttcacacccaattaccacccaagtctttgatcaagattatcaatatatttattccataaactagcacttctcaaacacatgaagttactaatgatatgatactgaaaagtttctgctgcccagcctactaaaaatatttattgggcatttactgatcagttattaagtaaattgactgtgcataattgtcataggcaatgaacaacctagattgtgccagtgctattgttatattatatatagataattaatatttaacaaatgagtttataatatttctggtgataaaatacgttaaaaattaacagcactaacgtgggagctaatttttacaggataactagtgggtgatttgaagcagaaagttgaaagaactcaagaggcagcgatgcaacctgctagggtaaagtccatttcagaagaaatgaaaaattatttcaaaatcctgaaggcagaaccatgctaagtaggttgtaggaactgaattgaactccttgtagatggaactgagtcatcaggaagaatggcaacgtataggacctggatagttgttcgcaaacacagcatgttagaatcatgtggggagctttttgctggctttcttttaaaccaatgacccaaagaagcaggtcagacaatgtaatctgaaaaggctgtgcaagacacagtgccccatagttatccctacctgagaaagataaagagatccctcatatgaattcaatgataagagatttcataccagaaatgagccatgctcaattcccccaaaaataaaagaggatttgggggtttgggcagttggaagtcaagttccattgtgagtgaaggtctgagccaatggcttgcacttagggtgagtatacatgaaacttttgaaaccgtgcctggcatagagtaagtgttgcagaaatggaaggaactgctaataaaatagtcttctgtatgcaggaattctgcattaccgattcaaccagcccaatagagcagatactggaacgcaactgcagaaactttggaaaagcagaatttgaacttgttgaatgagcactacagaaagcagcgtgtaagtagaatttgaacttgttgagtgagcactacagaaagcagcatgaaagcaggcctctgtatactcttgctgcttcacagatacttaacctttctctagcactctttgagaactgtttgcttgagtcctgtgcaagtttagtattacaaagcattaattagatggtatgcatgtagtaaatatgaacaaatatttttatcattactccttaagcaatacatgataagaattatttatatatcatctattttttattcagtattatcctcatgggatgaatttaataccttggaagattcatatggcttatatgaaaaataaaagggatgagcatctaaagatgtcggcatttataggaagtgatggaaccaatcttctattgatcccaaggcgcaagtacagcatggggactgagatctagggatttaggttcaggtcgagttagatcaaatggacttgggaatgactatactcacgtttaatttagatagtgaaaatactcacccttaaaaacgcatgtaaaattctggcaaaacagtacaaagcctagaaaactgaatgaagaacttggatcaccaaaatcctgagaagttaaagaaaatttgtgaagaaaaatagcagtgcaaatgtagaggggaaaaataagtagacttgaagttttcagaagttcatgacagccagaaagcagcagagctgcagtaagtactgtatggtggttgtaactttataaacccagactctctctgttgctcacaacttcaaaagatgagatttaagtgccttctcttgactatagcctgtatttagtggcttgtttttaatgaaatacaatctataaaagtgatggtgtatggtttaacaatatggttcagtgtgtaaagacacttccagacaagactattgtcattagttttatcacacgatagaaggaaagagtggactcctaccagttgtcctctgactccacatgccaaaggacacacatgctatggcatgagggtgcacatgcacacacacacacacacacacacacacacacacaatatgtatatacatattagtctgtgattactctaattgtatagcagtttgttatgctgtctagcctgtgagtctgtttaattttggagtgtggttttttttatttgtaagtttttataataaagtttaaaataaataaataaaaatcaataattaagccaagcggtggcggtgcatgcctttaatcccagcactcaggaagcagaggcaggcagatctctgtgagttcagggccagcctggcctacagagtgagttctagtacagccagggctgttacacaaagaaccctgtctcaaaaaaacaaaacagaacaaaaaaaaacaaataaacacaatacaataattaaaagatgagggcatgtagctagcaagcttggtccataaaagagccattcttattgctctttcttacacctctacctcttagagagcccattttcagatcaagagcatactaagtagccctattaagaggtttctttccagtggccagatcaaactcactatcatatgaatggaccactttgtacaaagaccctcccattctagccaatctttgcaaggaccattgctgagagagaaaatctgtcttgcccaaggacactcaattgcttatcccatataaagtggtcagccatgaaaccatatatacataatcagcaccaagcagacccagcaggctgtatttatataatatatatatatattatatatatatatatatatatatatatatatcaaaagcaaaagaggccatcaatttaagaagtgatgggtgacatgatagaggttagggggagagaacaaaggggaaatttagagggtggaaatggaaagggggaagtgatgtaattgtattttaactaaaaaattagttaagacaatgttatgagccagaatcacccataaaactattctcaactgatttgacttaaggcccagtccaccagatggaacccatacctctcactgcttggttgaccaagatccagggaccagatatcccagacacctaggataaaatcaaatattagtctcaaaaaatagtaataaaatgactagtaatgatattatactatgcatagattggtaccttaatcagtcattatcaaagaagcttcctactgcaacagatgagaacagagtcagagacctaccgtcaaacatgagagacggggaacagctctaaatggggtgtctccatcaaatctcttcccacaatgttcagggaaaaggaggaaaacagagtgtaagaggcagagagaacagaggacaccaggagaacaagtccctctaagtttcacgtgtaagaattagataataaatacatcatattcaagttttgctatttgaccgtattcacattttaaataggaaagaaaaattcaccgacttcttaactacttttatggggtttaatgcactcattaccctgtatactgttccaaggttgagtacaaacccacttaggaacaggatggagatgaaacactaccagagatctttcccttcacccacttcctgagccttgactaacagacatcttatcctgcagcaagtcatgttccaagctcaggcggcagaaagcttattttttatagcaatccccaaagcatggaaaaacaaacagatttcttggtgtgttaatgcacaaaagctgtgctaagaggcagtcactcttggcagcataaaaggtctgattgtctatagatgtttgaccctgaggccatgtcatctagcttcccttttgttgttttgttttatctctacgaaaatttattgaattttcctttcaagctacaaaatcagaacctacttattgtaacaataaaaaaaaacattgccagcaaataatgaaaaaaaaaacagcagtgtccctttttccttcattccccaggtaatcagtgataagtttgttcttcaacctgctatcttttctctatgaattggccacatttgttttttaacctagactatccaacatgaattactttggaatatgtatcattttcacttaagacatattacagttgtcactttagattaataaaaacagataaaattcattgttttatacagttgtgtgaaattatatagtgtggatagataataaccattcccttgctatttccagaatttatgatcacacacatagctcagggtcaggaggaatatttccttagcaataaatcatttgattatcatgcacagggctctgggtttgatctcacacacaagctagaaagtgatagatgatagaaagacagatgatagatagatggatagatgatagataggtagatagatagacagatagatgaggcaatgggtaattttttaaatttataattatattttgtataaatcgaaaacatctttagcctttcacggttataccatcagaaaacaatacaaatacacaatataaatttatcaaaacttttacagtatgcaacacaaaatggaatactagtaagggttcccatttctccacatcctcagtgtggttgaagaattctaaacttccagagtctacagtgaagatagcatttcaaaacagctttagtatatatgtccctattagccacgttgagcattattcatatactttagaaaactggttgttctttgtttttcacaaaagtttgctgaaggagacaactaagcagtgtggacattttaatttgttttgaattgtttatttttagttgaattaataaatcctgttagttagagtagcttttgtttaacagcaaagttgaggtgaaagttcaaatttgccacatatcccatccctcgccagcaagtggcctcctctttgtcaacccaacccaaccgtcatccatgtggcacactttttacaatctgtgagccagcactgatacatgaatatcatcattctaccagtctgtccgccgtgctctgctttgcgttgtttatgttttgccagttttacaatgcacatctatcacagcatcatacaaaattattccactgtcctcaaaaatcatcgctgttccacctatttatccttctatctacctctctcctctgtaaccatgatgggtatttttgacatatatctgatccttccacatggcctttgaagagtgactgagatcctttctgaaagaggaagatggatgtggtagagatggctaccaatggccgcagtggaactctgggctgatagtctctgaccgaaacaaggtgaacgacacattccatgctgccgtatgtcaaaatctgatttttttcatggagagagagagagagagagagagagagagagacagagacagagacagagacagagacagagagacagagagagagagaggtttgaacctcttcatttatcctatatagagaggtgctcccactatgaattctgatatgcagagaaaatgcaaatcctttattttgcccataatgattctgcatgttaaagaaacttcctactcattggttaagatgtatgaatgcactacatggcttagtctccatcctatgcaccaataatttgaagagttcctttgggtagcaggctctaatttgtggaaaaatgcttagtttctcagggtaatactcacccatctctgttctcaagatgttacattgggtggcagcaatatatcagggatgataggaagaaaatcctgcctccatgtgtactcactggcccccaagtaagctaagctgtgtgcccagaaatcctcaggtatctgcctgtctctgcctccttagaactgggatcataggcatacaccactactcatgaaattttcacatgggtagtgggagtctaactcaggtccttgcatggcaaacgctttgctgcactatctccctagtcctgatggtagcatctttgtcacagtcaataccattggttgctgctgcattcacagagaactctgttcctgaaatttctctgttatacagacaagctgaaagagtcacaattcagaatcatctgtgtgttctaagatggacatctctgagtgaccactgtggagctggccatacctagaatggttttagaaatggcacactagtgaagaagtcaaaggcattattggctcacatagaagtccatgcccagtcatcagcaggaaagcacaaagcactttcatctttcatgagcgcttatgaatgccatgcagagctcttccataaaatgacctaacagattagctctctgtgacctgatgacaggggcctctctaaacctggaacatgatagctaaccaggatttcctgtggaatatggttaacaaagagcagcgaggcttcttactgctataactgccctagctcctaggtctgatatgtcaactgccacaactccagtttcctttcaccagagaggtagaaaacagtattgatcacttcctcccatacttaaatgtcaagctactattcattaaatgacagctagtccagagattcagctcttatcacagcatctgacaagttcagagaagaaagaaaagaagggaagaaaaaagtgagtttggaattaagtattcagggactacagtgagacacctttgtatttggtggtttctcatcatgttaaaaaagaaaaaagtaaagaaaaaactctactacaattaaaagagaacattttttaaaaatctagtattcatgtctcatgtgagatggctaaaatgccaaagctttaaggactattccaagagtactgtgatggggcaaaagtgcccaaaatgtgtttaaatcatgaggttctaagcattgttaaatgaggtaataatgagcaatatagaatatgtagagtgtgactggtttatgtgactctaaacaaaatcatccaatagtggcactcttatttgcatttctattgctactaaaacaccatgaccaagagcagcgaggagaaagggggtttatttcagtttatagacccatatcttacttcagggagtcagagaaggaactcaaggcagaaactaaagcagaagccatggaggagtgctgcttactgacttgctcagccttctttctttcacctgcacaggggtggcactgcccatgatttcctgagcccttccatattcatcactaattgagaatatgcagaccctagtttcgatttctgaaaccaatgaggctaacttgtagagcctgaagaagccaggcacatagtaaagtgctatcatgagggagggaagacaccttacaaaaggtgaggacgtggtggaacattagtggagtgcaagttcacggagggatactgtatgtggagagggttatgcagggctgggagtcagggaacagagaacaggagggagtagaaggaaatgttaacaaaaactaagcatgtatgaaaaagacccgtgaaacctactattttagaagtctatcaaaatatcatttttaagttgtgggtctagagactccctgcatgggtaaataatgattcccctagaagccataggctactgaatgaaaatccaagtgacaaatatggaacaccttcctataagttagtcagagaggcccaatgccccaaaataatgtagattattgccatttctctttgctgactaccaggacgagatgataagactctattgctaaatacatcatatacttggttgtagaatatcaagaaaccaaacagtagctgagctgaaagtttcctccttgatgtctaccctttcgtagcactagatggtactatacctgctgttgggagagaaaagttatcaatggtcctagatttgggagtaactaacctaaaccaatcattctgattggatttgaagcctactccacaaaagtaggaattttgcctggtactataaatatggtcaagagtccatgactagtgttgtggtttaaataggaatggcacccatagactcatatatttgaatgcttagtagggagtggcactatttgaaaaggattaggaagtgtggccttgttggaggtagtgtgtcactaggggtgagctttgaggtttcagaagttcaagacaggcctagtggctctctatcttcctgatgactgtggatccatatgtagaacattcagctatttatccagcaccatgattgcctgcatgctttcatagtcccctccatgatgacaatggactaaacctctgaacctgtaagcaatcccccaaagaaatgctttcctttgtaaccgttgtcatggtcatggtgtctcttcacagcaatagaacactgactaagacagctagggaagtcataagtctaaagtagcatgctgtcaaactgttttctaaatgcttatatttggacttattgtttcagctctcaaacttcatggcaccttttttcccataggtgccagttaatgtagagacttacagatggtcaaaaagctgaggataagttactgttgaattctcaaacctaaactgtaggagtatgctaacagctggctcagggatagtccagcatacacattagtaacttccctatgagccaaccagaagtctgccttgaggtcttaagatagctgatgtcatgatgacataggccaatgagagagacaacacagcattccagactggcactgtccctgggtactgggagagggtataagagatctgtccatacccttaataaaggagttggcttttgcttttcatctggctcccggagtctgcaccattgattctgccccttctcctcgccttccccaagaggctaccttcttggactcattctccccaacactaaacagaacatttatatcacttcactaactccatgccacacaccaagctcaggaaaaatcacaggagagtgtgtgggaaggatggaagagccagaagatgtgaggggaatcctttaagatcatcttctggtgtgaagggattattgcattcacgaactcattgtagttgtggctatctacagaagaaactcacaaaactggaccttgcaacatttcatcgtagatgacagaccagttcacaaagccccactctctccacaaaattatgggcagttaatgggtactaaggaagagaagtcattttcttcagtggtgtagccacatgccaattttgcccatgctctagcaaacaattccctacccgtgttcacatgtgaagccataattaaaaccagtgcgtcacacacacacacaaagacatcaaagcaaggtgggcaagcttgctgtgaagaagagggtttaagcaggacaaggaggccaataagaaagggtaatgagtaataagaagtcaaaatttattatacacatatatgaaattctcaaaagaattttaaaacttcagaaatgcctaggttttaaagtacatattctaagggtccactttcccatggagactttttgaggatcaggtcttcactgcactgtctgatgcatctgcagcagcttttctgggaacactctcttcgcctgtcaaatgagccagaatagagcatccttcttccagggaacatcaggactgttgctccctgcatccccagagccattccaggaacagaagtttctgtgaaactcagtgctttcagagcgtcctctccttcttagttagagcttccattgctgtgaagagacaccatgaccacagccacccttaccaccatatcctggtgctcctttggccctcaaaatgtacattttgtcatttaccctgctcagcttgttccttttcattataaattttcattagagttaacactagtaaccacaaaacagagtctgtaccaggctgtttcaagatttcctctaccatcagaattaatccaaaactcttcactttagccccaggcacactctttgggcaaggtcaaaaagcagccacttcaccaaaatatcacaagaataatctctaggcaacataataagatccttctctgaaaacacttggatgagcccctgacagttcaaataactcttagcaccactgcctgtcatggtccaactagtatggttccttaagcagtgcttagagtattccaccatttaccaaactccgagtaatcaaattccaaattcctccaaatagaaatatggtcgggcttatcacagaaacaccccagtccctggtgccaacttctgtcttagttaggtcatccatttctgtaaagagacaccatgaccacagcaactcttataaagaaaacactaagttgaggggattcacttacagtttcagaagtgcagcccattacaatcttggcagggagtatggtggcatgcagacaaacttggtgctgtaagagtagctgatagtactacatcttgcaggcaacagggtaaggcctcccatgggaaacaacaaagcatggcacatcaagctgaggcaggaccaagctcttcccccgcctgcatcaaggctgagcagggcatcctaccatagggagtaggttccaaagagccagctcatacaacagggacaggttctgattccactgcagggagtccccacaaaagaccaagctacacaattgtcatccacatgcagagggcctaggtcagttccatgctggctccctggctgtctgaaatcttaagaaagagaactacagaccaatattcctcatgaacattgatgcaaaaatactcgataaaataatggcaaattgaatccaagaacacatcagagaaatcatccaccatgatcaactaggcttcatcccagggacacaaggatggctcaacatacaaaattccatcaatgtaatccaccatataaacagattgagaaaaaagaaccaaatgatcatctcactagatgctgaaaaagcctttgacaaaatccaacaccctttcatgataaaggtcttggagaaatcagggataaaaggaacataccttaacataataaaagcaatatacagccaacatcaaattaaatggagagacattcaacacaattcctctaaaatcagggacaagacaaggctgtccactctctccatacctcttcaatattgtccttgatgttctagctagatcaattagacaacaaaaggagatcaagtggatacaaatcagaaaggaagaagtcaaactttcactatttgcagatgatatgatagtctacacaagtgacccaaaaaactctaccaggaaactcctacagctgataaacaccttcagcaaagtggctggatacaagattaactcaaaaagaaactgtagccctaccataaacagatgatacatttgtggagaaagaaatcagagaaacttcaccttttacaattgccacaaacaacataaaataccttgggctaatgctaaccaaaaaagtgaaagacctgtactgtaagaattttgagtctctaaagaaagaaattaaagaagatactagaaaatggaaggatctcccatgttcttggataggtaggatcaacatactaaaaatggcaatcttgccaaaagcaatcacagattcagtgcaatccccatcaaaatcccaacacaatttttcacagaccttgaaataacaattctcagctttatatggaaaaacaaaagacccaggatagccaaaacaaccatgtacaataaaggaacttctagaggcaccactacccctgacttcaagctctattacagagctgtagtcctgaaaatagcttggtattgtcacaaaaaacagacaggtagaccaatggaatagagttgaaaaccctgatattaacccacacacctatgaacacctgatttttgacaaagaagctaaatttatatgatggaataaagaaatcatcttcaacaaatggtgttggcataactggatgctagcatgtagaagactgcagatagatcaatgtctatcgccatgcatgaaacttaagtcaaaatggatcaaagacctcaacataaatccagctacactgaacctattagaagataaagtgggaaataccattgaattaattggtacaggagactgcttcctgaacattacaccagtagcacagacattgagatcaacaattgataaataggacctcctgaaatagagaagcttctataagtcaaaggacacagtcagcaagacaaaacagcagaccaccgactgggaaaagatattcaccaaccccacatctgacagaggactgatttccaaaatttataaagaactcaagaaactagtctccaaaacaccaaacaatccaattaaaaagtggggtacagaactaaataaacaattttcaatagaagaaactaaaatgtctgaaagacacataagaaattgtttaacatccttagccatcagggaaatgcaaatcaaaacaactctgaaataccatctcactcctgtcagaatggctaaaatcaaaaacaccaatgacagtttatgctggagaggatgtggagaaaggggaacactcctccactgctggtgggagtgccaactcatacagccactttggaaatcagtatggcaacttctcaagaaaatgggaatcagtctatcacaaaatccagcaattccactcttaggcatatacccaaaagaagcacattcatacagcaaagacatctgttaaacaatgttcatagcagtactatttgtaatagccagaatctggaagcatcctagatgctcctcaattgaagaatggatagagaaaatgtggtacatttacacaatggagtactactcagcagaaaaaaaaacaatggaatcttgaaatttacaggaaaatggatggaactagaagaaaccattctgagcgaggtaacccagtcaccaaaaaataaaccatgatatgcactcactcatatgtggattttagacataaagtaaaggattaccagcctacaatccacactaccagagaagctagtaaacaaggaggaccctaagagagacacacatggtcccctggagaaggggaaagggacaagatctcctgagcaaattgggagcatggggggaggctgggagctatgagaatgagaaggggagaagaggagacatgagcagaacattagggagcaggaattttgaattgggggaagaatagaggagagcaagataagagatacagggagccattgtaagtttaaagagaaatcaggcgctagggaaacgcctggagatctacaaagatgacaccaaataacgatctaagctacagaggagagtccaccttaaatgtcctcccctgataatgagattcataactaacttatatgccatcctatagccctcacccagtagctggtggaagtagaagctgacacccacagctaaacactgaactgaaatggaatccagttgcagggaaggagaagtgatgagcaaaggggtcaagaccaggctggtgaaatccacagaaacagctgaactgaacaaggagaaacccttggttcccagtctgatagctggaaaatcagcatgggactgatccagaccctatgaacgtgggtgtcagtgaggagacctctgaaatgtatggggccttttataatagatcagtacttatctctagtataggaatagacttttgtagcccattccacatagagggatactccctgagcctagacacaagggggtgggcctaggccctatcccaaagggcataacagactctgaagacctcaccctccctggagagcagaaagggtatgggatagatagggtgttagttggaggggagcaggggagaagggaaggcagaaggaactgggatggacatgtaaaataatcttgtttctaatttaaataaaaaatggagagaaaaaaagaaaaattataagatactcaggtaattttttattaacactttaaattttaaacctaaaacacagaactcacaaaacctagcaaaacaccaaaaatctgagtcatcttattctaatgaaaacaaatgctttcagtaacaaccacccccctgccccccatacattcactttctatggttacactaaccacaatcaaaacagcagatgagaagtcccaacaagcgacaatacacatgtactgaactgaagaccattcttagtgctgtaaccctcactctcccacccaatggcatgcatcctgtatgcagcatgtctacactgcatatctatcccctcagtggtcacctagtagccatcagatgaactgctgggatattttggtgtatttcttatcttacttgataatggctccaaagcaagagcattaatgacactgggaatgcagatatacccctgaaaaaaatctggaaggtactctcttctaactgaaatggtaaaacagtacacaatattttgatagaaagactacactcacatgctactttatagtatattataatgtactattttaaaatcagatattcttggtaatctcctactgtgcctcatttatatgttaaacattgaagtgagtattatatgtatggaggaaaagggcagacttgggaagtgtcctatttatgttttcccatgccccacccactccagcctttaatgtacatcatatggatacctattatatgttaaaacctttctacaaaggaaatatctgaccagataatcaatattaaaacactaatcttatctttaaaacttcttcagagaataaaaacaaaggaccttttcccaatttatttcttcagagcatcacctaccagaagctactgacaaggaccgcagcactatggaagctgggtaatgtatcacaattatgttgcgtttattccaggaatataaaaattgaggttaacactttaaaatcaatcagcttaattcaccacaattacagaaatgaaaggagaactgtctcatcatctcagcacatacagaaatccagcctccattcataatgatgaaacacatatcatcccaaacccagaagaaaactccgcaatgcattgtagagcatagatttattttgaggtatcattttgcatgtgcaaaatttattttggcttattccctaattctctgctccttggggtaataaagagctgattaatggagagcttaataactgtacacaaaagccctctgtagggggggcagtcatttcagagactcaacaaggcatttaaaaattaactgaatgtaacaggcaacttgaaacacaagtaacacaaaagaggctccagaaataaaaggacaagatgctgataatgatgcaattcaaatgccagtcacatttgtttctaggtacctggacaaggcttggtgacattaaaatgcttcactctagagttcagaggtagactctattgtactgattttaaaaataccagggctggagatttatcttagatacccacaagacacaaaattgtagatagttaattacttccacaaagagctgcctttatacaaggaaaaaaggaactaattttgaggaggaaggggaccagtgggagggaaaaggggggataaggaaagatgacgggggtggagtggctatgagaaaaggcaatgatatacatatgtgatgttataatgaagcctgttattgtgtatgctatcagaaaacttttcaattaaaaaaagcaatgtgcgttcgtgcgggcgtgtgtgcgggcgtgcgtgcggacgtgcgggcaggcaggcaggcgggcgtgcgtgtgcgtgtgcgtgtgcgtgtgtttttacagaactcatttccataggtcccaacttttccccaggacaggctggaatgggccaccacaagccacacttactattcatgttctttaccagacgtcaacatgggcttagagcccagaatgtcctaaggaaggcttctaaaacaaatgccaacaagcaccagtgtggataaaacttcagcagtttggaaactgatggaggatgtccttctgtatacatgtttcccttattggttgatgaataaaacactgtttggccaatgaggcaggaagataggcaggacaaggagaaaggaaacatgcaacccatgttgatggtgccattttgttactgtattttctcagacccaaatgaacacacggacactatattaattataaaactgttggtcaatgtctacagcttcttattggctagctctgtcttaatcattaacccatttctattagtctatgtatttccatgtggtcttatcttaccagagaatgcctggcacatcctttcctcccagtctctccatggtgtctgtttccagcccttctctatctacctttcccagaattttccttgtctcctggccctgcctatctgcttgcctctactggctataggccaaacagtgttttattcatcaaccaataagagaaacatatatacagaaggacatccccaatcaggaaaccagtgatgcacaaactgcattccccagttctggacctaatgtggtcaattccatgtccttgcactaggaccagaggagaggagaggagcctgcagatgagtaagaagtcaggtacagctcaacagcaaatcaaatttctgtagaggtttctccagctgtagaaccaacttcacctagtaatcagtgtattctctagggaacaaacctttccctgagtgtgtttaaaaaagagaaaggcagaaaaaatatttacccaacaaaatgtcaggaaaggaaaacacagatagaatcattttattaacagttttttcccaccctttatcacacattctccaaggtagcccactacctctgcaaactgcaagaccagaaaccctgcaggcatacatggcatggcaacccggaaaggtgcaaagggtcttagcagtgagtgggaacatctatcattaacctcagatcttgcagcgtctacatacatggggtgagacattcaggggcttatagcgtatcaataatttgtgaacagtttttcacttttgttctcaggtgccaagagtttgaggttctcaaatgtaggaagggatgacctttggctgacaaatcaatggtagttaattattaaaaggaaccattattgctgcatgccaaccttcaggggcctacattccagtaatgagaagatccagaatgatttgaaagcattcttatcagaaaacagccaggatatagagggatatagctgataaggcactgcatcccatttgagggcctttgtttcttactcaaagggtgggtcttgacttctctcttgtcactgccatgctctcttaaatcaaaaggggggaaaccctgagctcttgccttgcggataacgaaggaatactgagggctgacattcatacctctttcatcttgcttagaccagtctttccccagcatggttctccatcccctccccttctctggctctccactctctcattctttcttcctagtgcttgttgactgctcactaggtaccccagaaccactgggcacagaggtggatataaagaaatgcatagcctgacctctacttcagaagcttataatttgtctgcattgtcagttaatgaccaattcttccatggccttcaatccatcctcatcagtgtccttatagccttatagcttttcttttccaaagaaccataacatcctgtccaaagcctcctttcccctgactcactgtagtatcgtccagtatatattattgcttctctgcatgttaaatgtccactggatgcagactgtggaaatggaaattggtcctttctaaacaacgccattcatcccaaaagagactctaagagccttctctccactagctggacctgacacttcagctgctcgttggcaaacacagcccattgtataacccacagggcttcccagactcttttgtgttccaatccaaatttactcaagacccactgatttcaaagagatctgtgaggccttcgagctcagaagccagagccccatagtttacccctcctttcctagtccagtcttctctgggaaagtgtcatttactgcagtccccaaactaggaactgaggataaacaacatgacaaatcatttctgcttcacagggtgcaatgtgaagtcgctggaactgctgatgtttcataaaagaagctgtgcggtcgaaattatgtccaggaaaatggactcggttcgctgttgcctctggaaatattcccgacaatcttcactttaatagtttaaatttaatcaacttgccttctgttctcaaagttaaaatctcagtattaataaaccaataaaggcctatcagaaccagcacccgagcatatggtaagtgctcaaaacttaaataaatagatatttcttacatgctgcaacattctgcttctttactaataaatatttcaacatctaaatataatggcacaaagaaatttcctcctcctcctcctcctcctcctcctcctcctcctcctcctcctcctcttcctcctcctccttcttcttcctgcattgaagttccttccactatcatatgaatctgtaatttgagtgtaaattatcacattaggttcttaggaaaaatctttaatactctcaaaatataaccataagaacaacaatccaattagaaaacatgaaatagttctattctatggagttttgctaggcaagaaaaggggatgaacttttaatacataaaacaattagaatgggtttgcctttattagctttattactcattatctagcttttgaagatgaaaagagggatcactaattttgcctcatctagtctcatatagaaagtcaatgtagtgtagtttccataagcccttcttcagcaacacaaaaaaagtttgatatgctttatttttattcagtttaaactcaattttccttgagatttttcctttgacacacgagttacttagaagtataatatttggttttcaaacactaggatattttctacatagctttctcttactgattcataacttaattctgttgttataagagaatttactttgtgacattttaatcattgtaaaaatagtttgtcttaaacattagaaaacatcctatctcagcaaatctccatgaacatttaaaggaatgtttgatgtttattctgctactttaaaatgagatggtttataagtaaaaggaaagttaagtaaaaaaataaactatcttttttcttattctttaacattttcttgttctttatctataacaatttgtgactattgttccattggttattgagctagaataatttaaatgtggatttgcctctcttctcagttgtatgagtttgcgttgattttgaaagtccaatattttgtacctatagatgtgttgttttctgaatgaattgaagttcatcctttttgtttgttttaaggttatatagtcagtaacatttttgtttaaagaaagtcaacataattaaaacatgaaaaaaaaacaaagtcaaagaactgacttcctgttttaaaagattttctacaaatcaaagactacagtcattgggaatgcactagatgggatctggagagatagcccaggggctcttcctgaagacccaggttcagttcccagcacccacatctggtgacattacaacctttgccacaccagctccagaggatcccatgccctcttccagcctcctcaggcacctgcactcatgtggaatccatgcacacaaatgcacatgaatagcaagtatggaagtaaaataaactaaaaggctttattatgagagtaaagtgtagatcaatggcagcatggagacaaagccttttatgaactgatttccaaagggcttccatgactattcagtgaggggagattagttggtttaacatttagtctagggatgactcaatgtcctcatgatgtcagctagatcaaccattacctagatacaacacttaagacaaatgcaaccaaagaagaaataaatagaactttctggaataaataaacttttatgcctcataagtcactatagaaaaagggaaaagaccaatccatcagggaaaaaatggttgtgagtcactagtgtatctaaggtccagaaaaaaactatgacaagttcacagtaaaaaggcaaatatccaatataaatttttaaagtacaattttcacattaaaatgccttgcccttgttgctcggaaatgctttattgtatttccatagatttacttctgtagcccccattctactgcagtgatttatatgaatgctaatatctcagacttatagtctgggtgtgtgtagatttatggtaagcctggatatcctacattttttctattcaaaagtcatggttgtcccaggtatttcaatgtacattttaatttggattttcaatatgtatttttaaaagcttgtgcaatttcaattgagaccaagtttatacagtaacctagatgaaagacatatttttttcataacagtatttttaacatttatttgttttgtgtgagtgcatacatggggctggaggcaaacttgaagaagtgggttttctcctcccaccatatgaatcccaggagttgaactcaggcagccaggattaacaccatacgtctttatccactgagcttgtctcactagctcccacagactgatttctgaataagtcttttaaccacacacagggtgtacatactcatttcttcatgtcccctttcgtttgtcttggcaacattttaaaatatattcagaggcattcaaatatttgtaaaattaccattataattaccacgagatttaataatgtgttaagttgtcttaatttcaggcaatctagaaatataattgattatatttatcggccttgtattctataaacttttggaatttatgtattaatcctagtacattttctacccatttttggttttcttatgtacacaaccatccttatatgagaactacttatgcttattgttataattctgattccttgaatttatatatgttgccttatggcattggttaagagcaggataatgttaaatataggtgctaagaaaggggggcacctttgtcgtactcttattctggaagagaaagctttctattttggttgttgtttattttattgtttatttattttttattagaaagaaaattattttacatgtcaatcccaggtccctctacctcccatcctcccctgtttccccatcccataccctttctgctccccagagagggtaacaccttccatagggggtcttcaaagtctgtcatattctcattgggatagggcctaggctaacccccttgtgtctagtctcagggagtatccctccatgtgggatgggcccctaaagtccattcctatggtatcaataaatactgatttactacaagaagccccatagattcctaaggtctcctcattgacacccatattcaggaggtctggatcagtcccatactggtttcccagctatcagtctggggaccaagagttttcccttgttcaggtcagctgtttctgtgggtttcaccagcctggtatggacccctttgctcttcacacgtccttctctgcatctggatttcagttcagttcagtgtttagctgtgggtttctgcttctatttcaaccagctgctggattatggctatatgatggcatatgaattagtcatcagtctcattatcaggagagggcatttaaggtagcctctcctctgttgcttagattgttagctggtgtcatctttgtagctctccagacatttccctagtgcctgatttctctttgaacttataatgtctccctctatttattatctcttatcgtgctctcttctgttcttcccccaactcaacctccctgctccatcaagtctaactcacccctcctcttctccccttctcattctcctagttccctctcccctccccgcatgctcccaattagctcaggagatttttgtcccttttcccttctccaggagaccatgtatgtctctcttagggtcctctttgtttaccagcctctccggcagcctgggctgcagactggcaatcctttatgtctaaaatccacatatgagtaagtacacacaatgcctgtcttttgtgattgggttacctcactcaggatggtttcttctagttccatccatttacctgcaaatttcaagattccattgcctttttccccgctgagtagtactccattgtgtaatgtaccacattttctctttctgttccactattagtcccaatggtggttgagaaaaggtgcctgctgttgttaggtgaccagtagattttcctgaaggagagttcaatttttcctgttttgctacgtcagtttttaggtaatatttgactttttttccttcattaggtattacctgataaattcactctctgatgtatttatttgttacttgggaaatcttactagtttgtggcacatgatctgttttacatgttgttgggtgttttgttggtggtgtttggtttgctttggttttgagtgtgatggtagtggtcagctagctgtcatggtctttctgtgtcctcctttcagcttgagtaattggctcctatagctctgcctgacttgtatgttcagtactggggatttgaaggcaagtcctcttgtttccaaagcaagcactcataaccattaatccatctcaacagccccaatattgatttttgttactagcttttgcatcaatgcttataggataactttaatttttgttattgaattatatgtgaagactttgtcttagtttgtttgagtaaatttaatttgttttatttaataatacatggtaattcagattttctgtttcatcttgagttaaatttgatcacatatgatttcaaagagtttacctatctcatatgtgcctaaatttattgactacaattttcatcatattcataatcattttatatgggcagtatctatattccaagtctttctttagtcattctttcctttccttcctggttcagctagctagaagcttatcaactttgcttcatttagaaaatattttgattgggttgtgggacacatgcctataacccatcacagaaacctaaagcaggagaatggcaacttctactacatagctacaaagagataatgaaagaataatttggttacattgaaattatttgatttctttttttcttcatttttttgtttattgaaaatagattattttctcacttcgtatatcctgattatagtttcccctccctctactcctccaagttcctccccacctcctcttccctccagatttattccttctgtctctcattcaaaaccaggcttctaagagaaaacaaccaagcatgacaatataaaatataataagatgaagcaaaaactatatcacagttcaacatgtcaacccaacaggaggagaaaatgacattatttgatttatactccctgacttcagttcaaatatttaatgtttattttctcttatttaatttggctttaatttactctttttttgaaatgaaacatcaaataactggatactggccattctttaacaatataaacgtgtaaacatgtaactaacacacaaatttttatattttatgttttatgctttcacttccatttagctcaagataggtgccaattattattttttaaacattttattgccttgtatttatttatcttgtgcgcatgtgtgatgtgtgtgttttatggaggcatgcacaggccctcacacaactgtggaggtcaaaagaaaacttagaggagtctcttctctcctcttactttatggatctcagggaccaaactcagagagtgaagtgttgtagcaggtacctttgtctgatcaaccttcttgggaggccatgttccaattattcttttgacttgtcattgacctgtaaagtatttaagagtattgttaaatttataaacattcatagatttctgtgtgcatttattattgatttctaatttctataccatgttagaaaacattgtgccatatggctcattctgagtgcatttgtttcaaagttattttctattacttatttattttactttttgacattataattacatcattttccccttccttttcccttcaaactcccatatatccttcgtgctctcaaatttatggtctcttttttcatcagttattgtcaaattcatatatgtacatataatcataattatataggcacagcctgctcagtgtatagtgttacttgtatgtatgttttggggactgaccatttagaatttcataataggttggtgtgctcttccctgaggaggactatattttattgtttgagaatttcaaacatgcttatcaatgtgctttgaacaaatcctcctcccatccctccctatcttttgcactactcttccttcccaactccatctgctctttttttttgggggggggggtgtttcaagacaaggtttctttgtggctttggaggctgtcctggaactagctcttataaccaggctggtctcagactcccagagattcacctgcctctgcctccccagagctgggattaaagatgtgagccaccaccgcctgactcacctgctcttttttaacccatgccattctgtctatatgtgcatggttgtaggaccatcttctgaagcatgagtagtagccgctcaggggtcacatcatttaagaactgaccctcccacagcagtcatcagttgccagtagctcccccactacagatccaattttatgagttcctcccctacctatgctggtccctgaccccccaccccatttagggaaactctatttaaattctatttgtatatgtatatctttgaggaagcttctatggtagtttccaaattgctttggtattagtcgttgctccacctactcctttttctaccctgcactccattccccaccctcaccccacttaacatttcctcttccattaatccctttccttctttgtaccatctactttcttttggggggttgtttttgtttttgttttgttttgttttgttttttattcaaggcagggtttcttgtatagatctggctgtcctggactagctctgtagaccaggctggcctcaaactcacaaagatctgcctgcctctgcctcctttctatccctttttttcttaaaaccacatccaataatctccttaccagctatctggcttctatgagtattccaatccaaaaacacattatctaaagagtgtaagttaacatccacgtctctgcaaatgttacagatacttgaaatgaatgtatgttcttttgttaggcaagcatcctgttgtgcaagttggtagaaaatgtgcattagaacttcattatctttactctttctcactacttgttacatttattagaaagaactactgaggttatcaacatttatatttttctctttcctcattttagccttcaagctctgttatcaggagtgtcctaatttagaatgttatctctatgatatggactatctatttcatcactgtgaaataaccatgtctgacttaactaaaggaaaatatacctttagttgaatacaacaaatctgatagtgatgtatcctctatagtattcttgaaaatagtatttgcacagtatatcatactccatcttacatttaagctacattttcccatatgtttaaagtatgcttaatataggaaggtgtgtaacagtcttgtttcattctgatgatctcactattttaactaaacttaacataattattggtacagttgggactaatctatcactttgctattaatacagctgtatgaaccaccttttctttgttccatttttcctttttcctgtcttacttggattaattatgttttaagattctatctcatagccaacattggcttattagctgtacttctttgttctacttttaagtggttgctcaggggtttataatactaattattcacgtgtcatagcatacctttagaaaatattataccacttcacatacaacatcagatcacaacaatggattccaatccccctgcctattcatactgtcactctttccttacactttagtctgcatgactcaaactccaatatatattttctaaagatttaaaattattttcatttattaataatttgcattgaaagagagagagagagagagagagagagagagagctctgtgtgtttgactaaacattccacggcacatgtgtgaacataaggtaacaactttttggagccagctcactttctttagtttttaaagatttatgtatttatattctatatgtataggtgttttgtattcatgtgtatatctacatggtatgtatgtgcagtggccacagaggtcaaaagaaagcatagaataagatcctctgagattggagttacaaatcattgtgagctgccatatgggtgatggaaatcaaacccaagtcctctaggagagcagctggtcttctttaccaccaagccatctctccagtccccacttctcccattcttatatgagctctagagagtgaaaccatgtcatcatgcttgcattgttgagattgcaggtgcctttgcttgctaatgcatctggtggtcccttaaagttattttaaagtgtgtttgagatcaacttagacgctcacagtttctgacttccttcactcctttgtggatatccttctttcattgtggtattgcttttctcccacttgaagaacttttaatatttattgtagtgtaggtttgtgggcaataagttttcagtctgggctgaaaaatctcaaatgagtcttttttttctgaatataaaaatctaagcatacagacgttatccgtcaatactttagagataactgtgtcattgcctctgattttcactatcttccacaagaggcctaacggctttttataattctgtgaaaactgttctggcttaatttctgttgctgtgacagatacattgaccaaaagcaacttttggagaaaatggcttattttgcttacaattccaggttgtaagcaacctgggaattcaaggtagaaacttaaggcaggaacttgaaggcaggtattgtgtagcagtttactctacaattgaaactttccatcctgaagagaaactcattaagcaggaaggtaaacaactcacaattgctactgaagtcacctgaaaatgtccatatccactagtcccctccctaccagagtaagcaatgaaagcttaagagtggctctccagctaaaagaagctgcaaagaagactcagacaagccaagctgcaaaataagattgaggagatcagaccagctacctgaaagagacagaaaccaagccagttgtctggcagagatttaaatcaactgagacagtaggaaagacattcccaaacctggggagataccttccagctgtgcagtgctctatatgttcctatctttgggacctgtcacgcatgctggcgtgggctttggtgattcagctgtctctgagtcatttctgctcctctaagtaacccctcacccatatatctgtaagtaactcaaaaaaaaaacaaaaaacaaattggttcaccactttggtggtgtccatactttagtttgtgttagaatccctttctggagtgaatagggatgtgtgttgtgtctccccaggaaatgctttgtcatatgacagcagtctggcttgctatactacacattaacccaaatcaaagaactcacttcacagcaaaaaaaaagtatataagaaactattgaggaagatgttgctggctggctggctagctggctcagtttacgatcatctacctaaggattggtgctgctcatagtgggcctgttcctcctacatcatttgataaccatgacaattcctccaaagtgcccacaaaataatctgaactggggagttcctcagttgatattatcgtcctgtatgtgtataaggttttgtcaaactgacagttaaagctaaccagaacataagcaatttgtttttctctgtgagcttttaagaagattttcttttcattattggttttgtcaatatcgttcccttgtatggtttggggtgcaggaatgtaggaatgaaattgtgttttttctctttcttgtgtttcactgaactttatcttggagtgctatagtttggatatcattggagggattattggaaggttcatatttgggaagtttggttctccatggtggaggatgacagttaaagggacaacttttgagaagtgagacctagtagaagctaatcagatgaaaaagtaccaaccttgggagggattaaggaaaatctcatgcatctgaattagttcctccaagaatgggttatgaaagaaagaaagaaggaaagaaagaaagaaagaaagaaagaaagaaagaaagaaagaaagaaagagggaggagggagggagggagggagggagggagggagggagggagggaaaaggaaggaaggaggaaggaaggaaggaaggaaggaaggaggaaggaaggaaggaagaaaggaaggaaggaagaaggttccccagcctcctgaattttgtttcacatgcaatttaacgttttgtcatatgtttctcccataattccaagcctctgccaggaaacaggccttagttttggtttactggaagtggctggagctgagtaaatagtcctcaggtaaaacaacaactcaggggcaacccatcagcaggcactcccttcaccttctgctggctcagcaggtgaccacagtctcctgacaactaagatagctttccccaccctgcccctggaaagtccctagccactagtgcctcccaccagtcagccctcagactcatctttcctccaccaatcagccccagattaatccctccttcctggaattaccctaactctggcttaaatggagcttttgaccttcttttgggggtctccatttgccaccccaacactggatgaagaaagtgctcttgtttattgcatatgtgactattggtcttttgggggggctctctcagaccctaacactgagctttgttctagtataaatttgggttacttgtgggtcactttgacccttgtaatttcttcctaaattgtatgtggtgtatcactagacttgattttagggttaaagccaccaaaccctcaaagtgtgttcttcctgacatcttagttggatgtttgggatgttcagttaatcttctctgctcttcagccaggtctacagtgagaatttctatctgactttacatttccccataactgttctctgactgctttagctcatcttccctgatgcatgcatgcttcagtattctgtgacagaccagggtgggagatgcttctgctttttctagagctcttatgttgtgcagctacccttccccctgtactttccgtcataacttgcacagttttttactgcctattgtccaaaatctgataagagctgattcatatattttcccattaaaaatctgttttgaaaggaggaatcaacagtgttgcttccttgactgagagcagcagtgcataattgacttacttgacgttacacctttttttggatattatcatttgattgtgcttcagcttcaaatttcctgttatctcttactctgtagagaaaattttaaaaaacagtgctgtgctttccaccactggtgcagtgttaagcatgtcatcactgagcattgcaaagatgctgctcgaaagaggcttcccttctcagtcacagagtgatccacatggcaggttttctagcatggactggtttcactggcaacagattcctagtgtaagcagctttagtagcaccccagaaaatatggcagtaaatagtcacctctctcagagtctcttactgtagcaggctgcttccagaacatatcttatcccaaatagctttctggcaaagtctcaagtacaggtttcaagcaagttctcttaaagtgacaaatttccatttctctgccatataattcactgaggctttccctcaatgcttctggtcattggtccacctcctttggatcaggacccaccttgactatccttctagctaccgggtatatattcctcattgtataagcaggaactagaaaaataaccatagagtgggtacttgaactaattaataaagaatacatcgaacgctaaatgatacctatttattatctgacataaatcaactcagtagggcattgcatttcgtaagctggtttcaagatttaaagtaattcacaaacttgaaaactctctagcaaaagaaaggtcacgtgttcttgagggagtatccagccccactgattcaagcacacactgtaaatcttcacctaacctcccacaaagaatctgaggctatatactactgttattgcatctctgctattgcttcttgcagctgctgtatgtatcgtaactcctaatagtcttttaaagattttatctctcttttttaggcaaagcctctcacaacatctccacatgcattataagcttgcgatagcatgctaaatgtgctctggtgttgtgttttcaaacagttgagagaattaaaaggtatcttttcatatttacccacatagttatctcttctagtcatcttcatttctttctgtaaatctaaagtttgaatctggtgtcattttttctcaggctgaaaagcttcctttattgtttctagcaaagcatatgatttctccctttcactcccctgaaagtgtgtttactttgttttcattgttggtgctactatttcctgaatacaaatgtctggtctaactcaaattatcattcagttgtttgctgtgttccattatctatcattagttaaattactctgattgcatgatatattatgtgtgccatttaagtttttgcaagttttcaggatcctcatctttggttttaaattatattttttacatttattaattgtgtgtgcacgtactgttcaagtgtgtgtgtgtgtgtgtgtgtgtgtgtgtgttgtgagaggggaaatgcacatgaagtcatagaacaatttgtttgtgtcagtcctctctttccattatctaagttctaggcacttggattccagtggtcttcttgacagcaaatgtctttacatgctgaaccatctcactggcctgggtattaaattttagattccaagaaacataaatttgacattttttttcttgcttgggattcactgaaattcttgggcttaaaattttgtttttaactaatttgaataaattttaccaatgcatctttcaatgtttctatctatggtgcatccaatcctttctctttaagagtctgagtgtataggcattagatttttttcttgttgcccaagtcactaagactgctcctttttcacccatttttctatgttcttcagattcgatattttttatttggtttcaagtttcttgactctatgctacaatgttaccaaatagttaagtagattaacaaatttttcttttttcatattcaagtctagatttcttgactgaaaagccatgactgttcacttactgtagggagatagttccattagtccttgaacctatatatgcttagtgttttaacactcctgaatgctaatatacatcctttaaaggtagttttataaagatggcttcctcttctctgtgggtcagaatttttcctttgttcttgtaatgagcattttctaattgaatactaaagtttgcctatacatggtagtgtttctggatttattaccctcatgcacttgtgctgtgagtaggctccatttgaggacttctaggtttaacacaatgcttgcacttagcaaaatcattcactttaacctgctcccaccaatatacccagaactgacaaattacaccattctctcttcttgttctagactttctgtgtgtagcacttataaccctgtattaaaatgagttgcaagcagatgcctagccactcaaagcagcacacaaatattatttaacctatgcatccttagtacctagcctagtgcctgacacttaatgttgggatgcttgttatatttatagaaacaagtgaaataattaaaactcagaatccatttgattgttaagtcatagttcataaaatactgcaaaatataggggtcaattatttaagtaaggactctgatacaaactcagttcagttccaactaaatatatcaagttcccagaatttacattcaaccatgattataatagactttgttacaaggtctattacaagccaagaaaggacaatgtttcagaaagaaacaatcaatattgattgaaatgaagctttaacatgtgtaaagtaagggtttcttgattgtttatttggtttttctagacagggtttctctgttaatagtcctggaactcactctgttgtccaggctgtcctcaaactcacagagatccacctgcctcggcctcctgagtgctggattaaaggtgggcaccaccaccacccagaaaaaagtaaaatttatatattaatcatagtttgttctctgtttaaaaatattgaattatgtgcatgtatacatatgaataaaataatatgaagggtgggataggtctatttgtaactaggattcacttctgtttcactcttactcctacctctaatgactggtgttatcttggagaactttaaacaactatccacaggtgtggatttatctgagcacaaactgaatcataacaggaatgcttacattaccttgcaggagtgctatgggcatcgaactaagtcatgaatgtaaagggactttttggactgcaaagagctgtagaaataatagagatggtaggtccaatagaccatgtccatgacaaacacctgactttgacaatttaatgcaagaggattgtattggggctcagctttttggtgtatgatcagttagctgccctattttggggatgtggtaaggcctcacacagtggcagggaagacattgaacaaagctgatcctctcatggtggccagtgagaaggggtgggcgtgataaaatacagcccccaaggcaatgccccagtgacacagttcttcttttttttctctttttctaaattaattttatttaaattgagaacaatcttattttacataccaatcccagttccctctccctcccatcctcccatgccacccacagacccccaccaacccaccccccatccactcctcatggagggtgaggcctctcatggggaattatcaaagtctgtcacatcgtttggggcaggatctaagccctcccctgtgtatctaggctgagagtggagctattgtttactccccctcccatttgatttttttatttaaattagaaacaattttattttacctatcaatcccagttccctccccctcccatccttacatgcatcccaccaacccccccatcccactccctatccactccccagggagagtgatgccttccataggagatcatcaaagtctgtcacatcatttggggcagggcctaggcctgcatttaggctgagagagtatccctccatggaggaatgggctcccaaagtccatttgtatactaggaataaatactggttccacttcaagaggccctgtagactgcccagacctcctgacacccaagttcaggaggactggttcggtcctatgctggttcccaagctgtctggctggggttcatgagctccacttgctcaggtcagacacagttcttcttgatgggtccaacatcataaagtttctataatcttcccaaatagcagcactaggcggagaacatgatccttcagtacacgatgcttttgaagggacatttcatagcctaacagtactaaatgagataatacaaataaaccacaccttccaacaatgcccatcacatcaaaactccaaatcctagctccctgtgctctgaaacacacaaatgacctaacacacacattctctcacacagcaacagcaacaaagctgacatgatttttagacattttaaatgtctttttcaaagcaaagctctctattgcttttatgtctttaactgacttatcttccctgctcccttctttcctctctcttccaccaagaaacctgtactcattgataaaatattttgttcttattgttaggttgctgaagccatttgttcttctaatgtgtcagagaatgtaaaaacaccaagtaaaacttttctctggagaagttacaaaatcaatgctgtgaagatcacatcatagaaattttgagatctatgataatctttttataacgtttttctaaaagatacattttttgaaatatcttaattcttgatgttatatctcaggctaaagagcacttgcttgtaagtttgtcgaagctattttcctgattagagttcaaacatattgatccaatgttagtcccagttccttcaaaataatgattttttcctagttttaaaagattcattgttgcaaatatgtgagaaagtaacaaataatgtaaacagttctacaaggaggaaaaacactttcaagtgtgttcccgtgactgttacctctactctgctcatttttttctagttaactttgtatgagagaagtctaaaagagggacaggggaatgatatgccttatctactaacatggaaatccttgaacacaaccttccactaagtcagtgttcacacaatcagcttcctggagatgtattatgcacctaatgttgctctgctaatactcaacttgatggtggatcaacagaggagaatgaagcccctatcttcctaatacttcaggatttttcaccctccctcatccaaccacacatcagttgaccaaatgccacacaaagttagtgaaataatactactctgtgagttcttccctggtctcctaaataaacttgtccattttgatcttatatttttaagaatatccttaacccaaacaataatacctcacatgggccttcagcagggttttgttgttgtttttgtgcttcttgtcattttgcctgacttcccccattgaactataaataacattaaaaaatggtttctgcattactcattattggagccccagaaccagttaattgcttggcacatagtgcttgagaaatgtacatagattatataaataacattataggcgttttttgatgaacaaaagaattgaataaaagtggtactaaatgaatagagatatttgtaatgcacaaggggagaaaaataaaataaaggaacatgagtatggcaagatattgggggatgattataagagaaaacaatgaaaatagccccacattagcaagcaatacaggtattgtggataaattataggagccaagaacaaatgactcattgtccatgactcatccaactgggaggatctggggctgcttaggtttgcccactcatttgctgtactccagctgtctcctgtagtgagtctaaaaccatgcaaagcatgtaaaacaactcccctggtgggttgctcacttatttctaagtgttggataggataggagtggtgccaaacacttaagtaatggggtaagaaattgtaagccctcgataaatattatatttacccctgatccccaaacatctcccatcttagacaaaataaaattgcaataactatgtgagaaaaatagatgtataaacggatgcaccctgagaatagtaaaagaagacatggaaacaaaagtctctaaaagaagaaattagaatttgtttcctatttgtgcaaagaagagatacttatattgctacaaagtctttaaaaaatataatggaactcccaactgggtaagactgtcaatgacttttcccccagaagactatataggaccttgaattagtttgagagctaaccaatagacaggaagcttcttgtttagtacctacttgattgttccatgtcctgtgaccaatatgtgtactgtcttcagcaataggtcttaccaccaagttataattggcaaccaaaagtaatgacagcttgctttggtagcccttggacattatcagagaagtttccttgtgcagggcataatagttaatgcagaaactcccaacaggtctaagtgtagagaataggtatctggggattgctcattcagcaaatgggacatctacatcacacatccttcacaagtctcagggactgtcacagaaaagcaggcaggaagactgtaagagccagaggtcagagagtgttgaagcaaaacaatgtcttctagataactgtctactatgatttcattaaatcataatagctgtggtttcctgcaaaaagtatagcaagtcaacattcttacatgaagtaggattgggattcatgagctcccatccctgagaatctatgaacagttgatggttttggatagagggattatcaattttcttaaaggatgttgattcctgagtgtagatcagctacactctaactgatgaccccacatgcagaagtgtatggacagcacaaattagaagtgatggattattaaataaaaacaaaagagaaacagaaagttaggtgttgagattgggatggagatgggaggaatttggagcaaataggatcaacgtgcattgtatggacttctcagagaattgaataacaatattttagattaatatagtggctaaatatattcatatttatgcagaaaatttagtgaattgtttaaaagagttcaaaacattctgacaaccctagcataccaaagtaattgtgagacttaggctgaggttcctcttgtaggaggctatcagggggctttaatcaataactctgacatcagccattatgcctttgaactggcatggtttcacacaaatgacgcacacagaggaccctctacatccagcctggacttcctcatgtatctatagaacagagaaagccacaggccacatatgagttgctcagcccaatttctgtgagtcagaatggaaaataagaactacagatattcgatatatagtagccatgggtgtcacaaagttggtaaaaaaaaaagttgttttcacatctttgtctcttagaaaattttccagctcttttctgagtagagataaacaaattcaagtgggaaaatctgcaacacaaaatatccccaagtcctcccttttgagagttaaaaataatatactatgatcctggtaattttaacataaatacctgaagaaatattaaatttgcacagtgtgcttcaaggataaaacttaatagcatttaacttaaactctggaatcagcacagcccatatctaagaaagcaacctcaatttcatttcagctgctatgtaaaaattaaaggacaaatgtttccatagattgaacagagtcaatatgaaaagtatgagaacaaaagcagctacagagaagcttcgttggtatgttttctttactgattagcctatggaaacaagacatttttactttggctgtataggaaaaaatagatgtagaaattgatagtatttaaggagtcaaaacagctaaataatgaaatatgggtcttttttttgcaaaggtctttacctttcagtcaataagaatggagcaaatcctctgtaaaatggctacattttaacacatcaggatgaaggccttttctcttgagcaagaagaaggaagttaaagctgttgtccctgcaacttattgtccattgtcccctttctactatgttacacttgtctcttctctacattgaggatggatagaggactggattgtctgagagtctatgtaaagtggaagccaaaagaggtttccaaaccaaaagcatctagaacttaaataagtaagcttaatccaatagaaaatgattcttagacctgagatccaacattacagccaaaaatttgtcttctgccatcactgagacattaaaaaaataaaggcatttctactctctacattattatctttagtcattgtattttatgagcatgtagatcgtggcttattggtgagtagacatactggattaaagatttgctgaccaaaaacaaaagtaaaaaatctgttaagaagtgtttctgcccacggctctgcacagagcatccttgacctctttgttcctgagactgtagacaacagggttcagcaagggagtgattatggtgtatgtcacagagagaagaagatctttttccactgaactttctgacttgggtttgaggtaggcaatggaggcacagccataatggacaatgaccacagtgagatgagaggcacaggtggcaaaggctttcttccggccttcggttgaggcaatcttaagtatggaagagatgatgaggacataggagatgaatatcagtcctataggcacgagaatcacaaatgaacttacaccataattgattatctcattgagagtggtatcaacacaggaaagtttcattactgggtatatgtcacagaaaaagtgttccaccactgtaccacagaagggcaaattgaacatggctggcacatggagaactgccataaccagaccggtgcccaaagatccacaaaccaaccaggcacacattcctttgctcatgatgaccatatatctcaggggatcacaaatggccacataacggtcatatcccattgctgtgagcagaaagcaattgttggtggccagggtgacaaaaaagaacatttgggttgcacagcctgccaaggatatggcaagattgtgaaaaatcaggctggagagcattcttggcacaatgaccagtgtgtacacggtctcagaacttgccaacatgctcagaaagaagtacatgggagtgtggaggtgatggtccatgcacgcgatcgtcacaatggtgatgttgccagccagagttaaaatgtagatggttaggaaaaccgcaaagagggtcatttgatgatgtccaaagctagagaatcccaagaagatgaattctgtcacttcagtgaagttctttctctgcattctgcactattggtgtctaaagtgacaagaagggccatcaagaggaaactttcatcagcaattgaactttaaagtagggagtaatgatagctgacctgagagagtgaacctacttccctcctttgtgaccatcatgatcacatctagagtatttgtccatgaaatgagaaaatttacacatctttttggaatttatgtatgtaaaaatgagcaaacattcctgtgcaagaacacttcctagtgcatgctcacctcacacaatatagtgatgttaagaaatgaaagggggcaggacagagacagacatgctctgttcctcacttaaacactcttaacaagaatcaggggtaagagaggatgggagggagagggaacacggggattgatatgtaaaatgattgtttctaaataaacaaggaaaaaatgcacacaccaccacaaattgtatcaaagaaaagaattaccaataaaggacatgccaagaaaatcataaagatggatgtatatagacaaaatgaataagtagtaagaggtgttggaggaagatagactttgaaaaaaaatggtgacaaagccaagaaccttttgacatagcgatgcaggtaaattctgaatgtgaaggcttgatttcatcaagaaaatatgtgtagggtagatcatactgtcaaagaagaacaactacaaaatggcttctaacacattcagtccgctaaaactgaccacccaaagctcaaagaaatatttatttgctgattgtagtagtgtttggggtgaagtcaaggaaagacttgtgactgagaaaacaattagtttctactgtaatcaaaaagaatacttaagacaatgtgagatatagagaaaagaatatagacttcatagtttgagagggaaagagtgggctaggtatttggagcccagctgatgcctattttgaaaatcaccaaacagacagtttgatgtaattatgagactcagagaatagtagtctcttgttaaaaagagagaacatatgggatggcaatttcattgcttatcatgcttgagggcttgggttcaatctccaaagctgcatggagcaggcatgacggcatacttggaggtacaggcataaggataggaagtaaaggtcaccctcagctgtattgtgagctcaaggcccacagcctggaatgagaggggcagagacagacagaaagggagagagaggaaaatataacctgtaaggagagcatgcacagtaacaatttcattattcctgttccatttccagggttgctaaatagaattcctttatcacattctctaattctttgcctgttggcatcatgtgatctatgcttatgataccattctctcagatgtcactggagaagtctccattgctaaagatctcacactttgttttttcttcctttccctgtcctttggtttgacacatctgaccctacctcatggaaacgctctttagccttggtttccatgacaccacattgtttctgtcatccctgtgcttatgtagttacttccatgaatctgttcattctgcctgtaccatgactacattcctgctctctggcccatcctttgcccttgctttttctatccttgcaaattcaattttctctgttgtttctatgttgattgctttcaaatatctatttctatcaacaatattttcccaaatatccaacttatttctctcttgacttttgtatgtcatgaaattacaacaatcttttttgtcattttataaatttaaattataaacaagcttgttttacatgttaatcccagttccctcttcctcctctcctcctctgacccatcccctttatgcccgccccagggagggtgaggacttccatggggatcttcaaaatctgtcatcttttggagcagggcctagaccctcccccgtgtgtccaggctgagagagtatccttctatgtggaatgggctcccaaagtccattcttgtactagtgataaatactgacccactaccagaggccacatagattgcccaggcctcctagctaacacccacattcaggggatctggatcagtcttatggctggtttcccagctatcagtctggggtccatgagctcccttttgttcaggtcagctgttctgtgggtttctccagcctggtcttgacttctttgctcatcactcctccctctctgcaactagattctaggagctcggcttggtgtttagctgtgggtgtctttatataatttttaaacaaattataagtcatccattgtccactttttgtatcttcttcagtgacctcatgatatcattatagtcagaaaattctggcatcctgaagttgcatctactatatgtaaaattcagtagactttccttaagttcttacctaattctgtccaagtttttagaaccattgtgatgtgtctaatgttaaggtgttcaactacctgtcataactcgggtctataatctcagcactgcatagcagaggctgaaggcttacaaggctcacaaccaaccccaatcactcagaaaaaacctgtctccaaaaacaacaaacagcaatcattaaagtatataatcctctaactaaggaaacaaaacatattctcagtctaaaaatcatatgcctgggggctggagagatggctcagaggttaagagcacagactgctcttccagaggtcctgagttcaattcccagcaaccacatggtggctcacaaccatcccttatgagatctggtgccctcttctggtgtgcagatatacatggaggcagagtgttgtatacataatgaataaataaaatctttttaaaaaatcatatgcctatggaatgacaaataattttggaaaaagagctataaactttaggagccaccctacttcagttactaaacagacccacatggtatgacatggacacaagtaggactctacaaatcatcaatgctgtggttctctgtggctaccatttcattgccccttattcattctcagaattactgaggcagacttcttctatcacatgctgtaattcctagcaagctggattgactaagtttatcctcataaacctgttcattcagatgcctctgaagaagttgccatcactagtgctgttggccttttgcctttttccaacttattctcattcttctctgcttcatttaacacttctgtctactgccccatgaaacacagaaagatgtaattcagtattcaaaagcgtaccatttatactgagacactcaggtgtctcaatgacacattttcaacaattgctcctagaataagcaaatattcatgagggagaaaacaaacctcaaattttattccatgacacatgcagaagttgttgtaaatgaatcacaggcatgtttaaaagacaaagtaataagaaattcgagacaaaaataagagatgaaaatctgtgaccctcaaataatgaaaggttcttaaagaagtaacaaaaggtttaaattaaaacagagaaaaattgtagcctaagcttcttcattgttagaaaaacaaaaagataaaccatgccctagtagaaagcattcacaatataaaaatctaaaattatatgcagaatatataaagaacttgcaagtcaacaataaggacacattttaaataggcaaaatatttaaacatttttaaaagattacataagattcctaataatcatatgaaagaattctgagcaatgttagccattggagagatgcaaagtaaaaccacagtgagatacacctactcaagtggctaaaattaaaaagcctaacaacacccaatgtggtaaccaagtaaaagaactggaagtcttaaatattaatggttagaatgtaaagtgttgtagcctatttggagaacaatgtggcatttttcttaacttaaacctataaagcatctatgactcagtattttttcctgagaatttatacaagagaaacaaaaaaaagtgtccacaaagagttatttgggagtcattttcctaaaagtccaaagctgcaaacgatgcaaatgtctaaattatgatatagctatataaagaaatattcccagataattaaaagtgaaaacagggtctggagaattgccttggcagctaaaacagttgtttcttgtgcagaggatctgggttcatttcccaggatacataaatctgaaaacttatcaaaattcacaaaatgtatacaaaaattaactatacactgtattagattttgttgcattacattgtatgacataatattgtgttatacaacattgtataataacatgctgtttgtctttatagtcctgtgaatgctaaacaactactctaccactgaaccacaccccaatcctcttgcattgcatcatggtgtaatattttaaagtatactccactagagttgatacttacaagtattctcatttgacttagcaagattaattctcagggggtaggactgcagaggaacactgtagtatgagaaagattggaattaagtaacacttagaaaacctggatctggattttgagacttatggatgccaaaacatgagatctgggacaggtcttgtttttgtgtatactgtggcttcagactgagagttggagttggagagttaaacaaattgtctgagttctaacatcctagtcaacactgctgttatgatctgagaaagacatcactactggactgataaggattgccacatcattctcagaaagtcaatatgctctataccatctcctccactctacgatgatagtcttccctgtgcatagggacattccaatatccattatcaaacctgtgcctatatccatatttttaaatcttacctggaatggcttttatttcttgcaacctattcagatatgaggcccttagtacttggaagaacacccgcacccttcccagtacacatctaggtgacaagtgaaattatgttctcactcttggatttaaaactgtagaattctaaacctatcaaactagaatatatctatttttaatttttaaaactgtttcatataagcattttaagactcggctcattgcctaccacatccatgaagtcctgtcataacagcccaattccgcactcccccccttttttcataaagattgtacccactggagtactgaatcctgtttgcatcacctcaccacagcaggctgcacacatcatttcccagctccatattcaaaagttgcatgtttgctaaattgaaatctatggagaaatatttttatctcaggaactaacaaatattaaaaatcaagacttgtttatttcctgagagttggttgttaatacttaccatacaccacttattgtagtttaattccccgctgctttgtgaaatgttgtctgctatctcctttggggtatttccacttcaagtcaaagtgtaaagtctctaaatacgtgctaaggttactacatcaaactcaaggaagcactcagtaagttctccctggctcaataatttagaatcctcattgcaatgtaatttagctgtttgacaaagggacagaggtgctacccataaaaatagtgggacctaaaaggagggacacctctatacagcttcctggaggggaaagtgatgtatttttccacctttcttcacatcttcctgcaaggaatcaaatgacactgcaaatctagaacaactttgggaagggagaagagtggtttaagaaagagaagatagccaattcagagagttttcacttactgaaaattgagtatggcagatgacagtgacagggagataagggatgatagagttggtcagcttttcattagtaggacttttcaggccttgcttctgctttgtgttcaatgcatctactgtccaagttaagagtttagagttaggagaagtattagcaagtcatctgtgtatatcaacatcactattgctcctgagccctctcattatggttgttgcacagatttcaaactcacccattcttcaatcagttgctgatatcaatccccaaatataacacccaagtgactgtgtaactctaagaaacacgtttactctttcagtcacatacatacatcagttatataacagcaggactgatgtcaaataaatattgtgaggattaaatgatctactccacttaaggacttaggacacagtacatgtttgatagtttgatagttaaaattatctttggcatggatttgtagcaaagagaagacattcaggaatttctagaacatcaaggaaaacaaaacaacaaaaatacagtatgaattgatgaaagttgagagggtggaagagagggagggtttgaatagatttaccttccaagaaaataacactgaaaaagactaaataaatgaaaagtttgtacacccaatattttggttatgaagaccgtatgtcaaatattgaaaatggaaagaatttattatcaaatacattgatagaaatcatgtctaatttacaaatcttagtaaaagcagtgatgtaatagaaaactttttaaaactacaacttggatcagttccctgaaaattaatgtgctatgtaaatgactactgcagaaggcaaagaaagaaaactctagaactgcccctcctgagagttggaaacacagttctaaaataaagaaacttatccaaaaatctgtgattattatatccgtctgagtaatataaggatgaagaatgcatgaatgtagggaagaatctgtaaagttatgctgttagggactgaactcaacaagcatttttgtgatgtctcatttcaggtcttgaccaaggatgagcacagggccaattggactagaatatattaagaagaatatatggcattcccaacatatctcagatctgttctgaccatatctgcaaagcaatgatttttttttaaaaacgtctttatgcctcctcaaggaaatacctcagagttgctcacctctctccagatccagatagcagtgttgcttgcagaaacagtagtgtaggacacaacatactcaggtgttccccaggctctgaaacggatgctaatagaagggaaagcttctgtgagttcagagatgaggagggaatctcagaaggaagccatgtttctaccctgccctcttgggtttcctttcttcacttttccctgagcatctcaagggaaccagaagagtcaggttccaaatagataccaggggattttattaaaaatgaggtttcttactgtcttgggcattgatgctttgggatccccagagcttgtctcccaggtgctttctctccttcattcagaactttgctgaagatgtcaggtgtatggtccatggattttctcttcagaagacagtgcactcattgacttggtgtttccaaggaagaagacatttctggaattagttcaatctcagctggacagatttttcttagaaaaatcatatcccacaaggtggtggttgttggtacacacctttaatcccagcactcaggaggcagaggcagaagcagaggcagaggcagttggatctctgtgagtctaaggccagattggtctacagtgaaagttccaggacaggctacaaacctacagagaaaccctgtcttaaaaagtcatatcccaggtactaattgttaggatcccaagagactttgattgtgtataacagatttctggcatctaaagttccctatacttgcacaatgtcaactctccttggatgaagcaagttcctttccacaattgtgatggctgttcttggttgtcaatttgactacaactggaatcaactaaaatctaaaaatagatggcacacctgtaaggggtttttgcttaatttgaagtaggaagatctagttctaacccatatgtttgaggtaagaagatacacctttaatctagatctttcgagctgggaagacatgggtttttcatccagatattgtggtgagaagatacatgcctctaacttgggccacactttctgctggaagcctatgcaaggacacggaaggagcaagcttttgctctttgccttctttcccctctccttgctagcaagcccattcctttattggagttagagcctatttcttctggattccagtgaatgctgaaaaacagttaagacatccagtcttgtgtactgagcaactactgggttcttggatttcggttaacagtcagccatttttggagtagagaaccctaattaatacaaaatatatcccatgagatccttccaagactgtaagagtgaagtttcaatttttctcttcaattcatgttcattgtttgtctttcatactataaatgatagaataatagtaagatttgatatacctttattttttaaaaagttattttttattattttcaatcatatatatgtctatgtgtgggtatgtgaacatgcatgcaggtgcctacagaggtcaaaaagtggatttacagatgattgtgtgctgcccattgtgggtacggggaactgaactctggtcttctggatctgcaatacatgctcttaaccactaagccatctcagagcccttatgatataattttaattctttataacttttataatgctagaatggctcatgttaagcatacacaaggatcataataaatagtcatatcaactatggcatatgtttccatccagtgcaattaaatggtcttaaatctcaacactgtctcaatggaagtcaaaatacggaatttctgacttttatctaaatcctgttttaccttgtgttttcaatccactaaccacctagttcaattttatcttcagttcatagtgaccttgacacttttgcacagcccttaatattttcaaagttatgtgaagcaaatatataaattcttaagtccaccttcatttatctccaaggtctatgcctttctcctgttacaagtttctatcagttcttacatgtgacagaggcaatgtcagcattaagtgttatgataaatctttccgccaaaagcttcccgagtcctactgccacgtgggcggtctccgccagccacccaagttctgcctgccatgtggatggacaaaataatacacagacttctattaggtacaaatgctgcttggccaatgactaagattctcatctgttagctcagtcttaattatcataaatctatatattttataaaacttatcttatcagacaccttccattggtgtccctccttgccagtgagttacattgtgccgctggaggaagagcagaggggaaaaaggaggccacttcctgtttctccttgcttaaatatgagtctccttgctatgtcacttcctgcctggatcaccacttctctactacattcccagaatcctctttgactcctagtcccatctaacttgctgccattggccaaacaggactttattcaacaagcaataagataaacatacacagaagtacgttcccgatcaattaggtctaacccctccaacatatttttcttttttaactaattattaggcaacatacaaaagtttattatgacatttttatacatatagcattaacattgttctttttcaattaaagtttttcttatattttgatcacctgactcatttaccaactcttcctaatcatctctccacccatataacttcatattctttctctatcatctatctcttgctcaaaacacacacacacacacacacacacacacacacacacacacacactataacaacaacaaaaaaacaagacaaagcaaaaatgtacaaaaaaaaaaacatggggtttgttttgtgttggctaactacatctgggcatgggcactaccttaaagtgttgatgatataaccagtgacaagtgacattccattggagaaaactgattttccttttgccagtggatatcagttgcagataacttcttggttagtggtgggagccagtgtccaactccccctctctatgctaggaccgtatttcattgaacctatgcaggtcttgtgcctgataccacagtatttatgagttcatatgtgcatcagtcctgttgtgcctggaagacattgtttccttggagtcactcatcacctctggatctttcaatcttcccacctcctcttctgcatggatccctgaggtttgagggaaggggtttgaaaaagacatcccatgtatgaaatcccatctgtgctgtaccagtaagtctcgaaggtgagtgctgttgtcggttgcagggtttgtagctgagttatattgatgatgacttgtctcaactgacaacacgcagagtatcttccacaacctttttcaatagaggggaatgaagcttctagttgagtgcttcaaaatctctcattctctgcatattgtccagttataggtttctgtgttaatgcaatctactgcaaaaagaaaattctttgatgagggttgagcaaggcatcgatctaagtataccagtatgtcattaggagtcattttattgttattttacattagcagaataatagtagaaagttttccccttaggatataggatccatgatctatgtagcctctggttcttagccactttagcagtttcagttacgggttccatctaatggagcaggatttaaatccaatttaaaacatgcttggttattcccataatatctgtggcacattgcaatatacctttaaggtgtgtgctattgtaggttgcaggttttgtagctaagtgacattgatgtttacctgttgcctctgacaacatgcagaacatcttccacaaccccagtcaatagaggtgaagcctctagtcgggcaccagcttgagttctctgtgttctgtgatgtcttcacaacagggccttgccatcagattgtggagagcaaccaatagacttggcaaaagcctgtgatgttttgtgggtccatggggccccttcagctaatgactcaacaaaatgtaacccattactggcattagagactctacttagtgacataagaagtctaattgggacattgtgttgccagttgttcgctaacccatttaaattcctttcttatatgtatatattgtaggaaagttctatagttgtagatttcaatatgatttttccaaacatctttatagcagttttccttcccaatattccctcctttactatgttctcttgtcccctttccaatttaatcttctttttctagttcccctttatctctctgtagcactacattctatcctcctttccttagtgggtcctttcctccctcccatctctttctaggtaccaaagctctgtggttgtttggattgtatcactcatatcaaaatcttaaaagctaacacccacatataagataaaagtttgtcttttagggtcttacatgtcccttccatgtccctcttctatctgcctcccctttcttcttcatcttcctctctttgtgtattagatgtgttcatctcctcttattgtctcatttctactttcacagcttgcacacacacacacacacacacacacacacaactttaaaatcaattttgtgtttgagaaaagaaacatactgtttgtctttctggatctgtcttaactcacttagtataatgatctccagctccatccatttttatacaaatgtataatcctattcttaatatctaagtaaaattctatgacatatgtatcatattttttcattcaactatagatgtatttctaggctggttctatatcttggctactgtgaatactgcagcagtagatgtacaagtatttctgtagtattctgtcttatattctttaagggatatacccaggaatgatgtaactgagtcatatggttctattttcattgttttagaaaaactctacacttattcataattatatgatgccataagtcacatcaggtaactttctctccaacaatgtgtaagggtttcctttctccaaatccttgctagattttatccaatattttcttgtatctttaatcaaaatttcaaccatatggaaatgttgcaggtatcacacaagagacccctgcacaaccttttcccagattcacaagttgtttacattttgtttcacttgcctcatcagctgacatctaaattatattagagtaagaaacattgtgttcctcattcctaaatatatcagtgtctgcttcctaagggaaaggaaattatcttatataacataatcaaaatttaaatatattaaggacattgtctcatcttaaacgctgtcaggaaacaaaataatatgtagagcttggtaatccacattacagcaggggactttggtaggtcagtggaagaattcaccctttaggccttttattctaaaaggaaaacaaatatatttagtacgctgtaaggagtgaagcaggcacagcaataagaagaaccaaatgggagatacggccctgggctacaggggtctccattctggagaagtcttcactcattgggctgaaccagtgtctgtatcccattcctggaaggatataacattactatgaaaatgaaggtgggtctgtaacatcaggttacagctaactatgttgacctcaccattctgatgttttgctattttgccagatagaactgtggtttttgtggggtggggtggggtggggcttattttttgtaacaagcttgtattgagaagctgttttactcctgctgtctgaataatggccttccttttgcacatgtcacagctccggtgcttcccttctgctctgaaaagaaccttgcttcttgtcttgttcccagtgaccttgttactgtatctttcagggaagacagaacaccagagccagagacccttgccctgccttacacctcattatctcccattctcccgcctgatcaagagcattgttctaaagcagctagcctctaggaagtgaccgattgcccaatacaaacacccatccctttcaaaaccctgcaatcttcatctctaattccttccatgacccaaataatcactcttactttgctttgatcatagctcatctatcttccctgataaaattgtaccttatccttcttctcattttgtgttttctcagacttacagagaagctaaagtacagtggctttttctagctactaaagagtaagttgcaaatacaggactcattgctctcaaatacttcattttccctacaaagacattctctgagaacacaaagtactcccccaaacaaaggaatgaacactgtaattccttactatcatataaacatcatctcataatcaaggttttccggagtgtgaccatctgaatcttagtcacggaagagtcaaattctgaattattcagactgaaactttgcatttactattttcttctcttgtcaatcaatctcagtctggaaaagggttcccttttgtttgtttgtttgtttgttgtttttcactacttggagacttccaaagattatatatcagtgattgacttaaatagcctcaaattttggattttctagagttttctcatggttacatttgggtttgtgtttgtgtttgtggataaggcaattctttctttgttgaatttttcctctttgttgttttcagtgctaagaatgaaagtcagggccttgagcatgctgggcagttcctctaccactgaactatactctcagtcttgcttttctttctttttaattgaaaatagatttttaatacaatatattctgattatggttttccatttcccctcctcccactcctcagacgtcctccccatatccctaccaatccaaatcacaccctttctttctctctcttccattaggatacaaacaggcatcaaaacaacaacaaaaaaaaaaacagccttgcttttctgctacagagtcttagtagatgaggcagtctggcttccaatttgccatgtcttgcctcagccttctgagtgttagaatgacatggacatgccagcttccaggcctctgaattaacctactttcaatgatgttcaatcactttattgaaagagtagaaaccaagattctctgtgtttttaatcacttatttgttattttggattgatagccttttgtacttcatcacgctttttattactcatttgccatattatagatttttaatatgttattttattcaatggcttgtaattactttcattatttatactgtcattcaaattctctcaaatttgctgcaggtggtgccctttaagttatctttggttcagttttgacgggtcttcattactataatcaaacgagaaacacaaatcaaagtcacggtggagtatcacccgtttgagtggctactttcaaaattaataaaaaaatggatgtatagaaattggaatccttgtacatattgatagaaatgtaaaataatgaagctgttaaaaaaacagcaaggcatttcaacaaaagcatttcaaatgctcactagccttggagggggggcacgtggactggaataaaacagtgtcttctgagaatgacaggactgccatactcatgaactgtcattgcctgtatagggctgcatagatcaatccagttgacactttatcatgggttggaaggggttcataagtccatgcccctaattgaggagatatgaacagtggagggagagtcagttttctttgtgggtgtggctcctggcagactctaccctagtagatagccctacacccagaagcataggcacatcacaaactggagctgataggatactaaacaaaaacaaaagagatcacaaattgggggaataatgaggtgggaaagatcttggtggagttaagtggtggtatttggtgtgaatttacccaacacccagaagtatactgacagcacaaattggatccaatgtgtattacattttttaaaaaatgttcttcaatttaaaagggaattcccacatgatctgagagttctatttctgggcctaccaaaagagttgaagtcaggatcttggaaggaccatagcaccacatattgtgaataacattgctgttattcacaatagccaagatatgaaaatattctcaatggtcctaaaagggtgaatgaataaagaaaatgttatctgtatgcacaatagaacagatgcaaagaagtagacaataactgatgttccctccacaggcgtgcagttctgattatatatgatgaatatattctaaatatctatgaacatcattctgccttagtaaacaatgcaatgctctattggctattaaaaagtatgtcaagtatacaaaccacaataaagaacaaatctctctctccctgattgaaagaaaatgccaatatatagttttctattactcaaatccccaaattatttactcaccctctagtatttatgaagcaaatttataggcagtagatgaaataaagaaaaagagaaaatactttaagagtttttacttggaagggtatttagatgaagtcatctaattgacatacattaatatcaaataactgatatacattaacaaaaggttgttgtgggaattcattcagtcaatagtctctgagccctgccctgaaggggctgatacctcaaagactattgactgacgaattcccacaacaaaaagatatatatatatatatatatatatatatatatatatatatatatattacatataaagacaaaataatgaaattactttaaaaaggtgacataacattaataatggttttaagcacttgctatttattcacagaagactggactaaaaatatttagtatgcatttaactattcaccagaatcctgcttcacatatgaggaacaataggttcaaaaggttgaatgttttatgaagcttgcatattgggaaaatgagaggatcataattggaacacagatttgtctgactccaaaacatttgcacttcatcaccatggcattctggagatggaaacaccccatcttagatcagaagacactccatgaagcagatggcatgtgagattgacttttaagaatcacccaagctttgaaatcagagatatgtctgaaaactattttagctataaagtgagtcaaagtacataaagggaaagccctgaggtgtgttaagaggacccacaagaaggagaaagaccaatagattgagagaaatagcaagagaggtgggaggaaatgaatggttatagatctcaggctactgagtctatatttgacgtaaggggcaaagtatagtctaagcagagttccaactctgtagacacctccctcagactttcagcaggatgacatcagttaagatctgaccagctctgatgattcataaaatgaatggcagttactaaacctgaggagaggaacccattcaagcagtttgggaagtggggtgaacagggaatgcagttcttgccagaaaagggaaagaaatgggagtgatcaaggagaatgtatccatggagacatgaagagcatttaactctgcagagaagagggattctcacaaagctcccagatgaacatcagtgagttgaccatttctaagtctgaagacagattacaggctcatcactgagaatgacaagatttgcctaaaggctactagcagtcccctgacccagaacattcctgtgaagctgggagtcctctttagacatttatggccaagctttgggttgatgggaaggctccgaagcaggtatactatataaaagctcatccaaagattattttagtgtggaaaaaattccttagacaggtttgattacagccagtcctttatgagaaaaatagggaatgtgtccatgtgggactatgtgctgttgctggaaaagatcatgtttacttatcagggtctacttcaaacccaataacatgaatttggtgttgaaatattagaggcaggattatctagtcaccatgacccataagtggggttgaagttgtactcaagtaggacaaaatttctgggaagaaaaatcactaataagatatacttactttgaagatgatactttgagccctgtagataaggcctgatgttttcttttaatttcccatttattgaattactggattcatagtaaaaaaaatacagtgtctcctaatatttgctcattacttttcattgtccagagcatctcttcagcagtcctgttttctaaagatagaatattgggtcttaaccaaaacaattgaagccaaagaaaccactggtaagggcttcagtcataataaaattcagggaagctagacattccagaaatggatgatggagcccactgccttttgggctacaaagctttcctaagtgctgaaggagaactatagtatgtgtttcttcaggtcctatcagcttcaccaccaagtgagaagagagaaggtagtgaatccatagtcagacaggtgtctggtgaagagagagtagagggtcagtcagaggtgtgtgtcctatcccttacctacatcagtctgagaactgtctaatcaaagtgaatttgaacttgatttatatcagagacctggaaattcagcttaacttataatttgtttctaggaagttctacagacctgagaggacttcacatagcagacaggatgaaagctaatatgcctgttataagagccaccaggtaagaaaaacaggaggacatcgagagcaatagaggacttttatgttagtcactttgtgtcactatgacaaaacaccaaaagcaggagtagtggtggaatgtaaggtagaaaggcttgattttaaccagctttggtgatttcagtacatggttggctggccccattactttgaggcttaagatgagatagaatattgtggcagcaagcacatcctggaacacgtaggtgattgcctcacgttggctggaaagcggagaaagacagaaggggtttcaagataaggcacatccttcagaggaatattcccaaggatatactaggaactcatccactaatgagtactaacccactaatgattccagcacctttatgatccagtcacttcttaatagtgccaccatctgtggttcaagcctttaatatgagcctttataggatacttcatatccaaaccacgtaatactctacatcttgtctccaaaaatcataacgtatcaattatcataatgaataatacatttagtctcaatagttctggcatttctcaaaaacccaaagcctcctctgcgactcaaggcaaacacaaagttaactgtgagttcctgtaaaatcaaatataaatataaacaattgcacaccataaatgttatcattctaaaaataaggactaggtcaaagaaaaagggtaggactaatgcaagacaaatcccatgaaagaaaacattaaatcttaccactctatgtctggaatcaggaggacttggtagaataatgtgagctcctaggaccttactgcctacaaaccacatggcctctctcttaggctggctcttctcactgcctttggtttttctttgtagatggcccacagtctcagcaatatctggtgtccattgtggcttgaattttgccctctcagcttcatacatcaccttctctagaaattgcccacagagaatccagactactaagtattgattgaatttctggttttcattttaaatccctgagggaacttccatgagcctgtgactatggcactccacatgactgcacaatcagcattgcatggacactggtcaagttctgcctcccgcttgaacttggatcacagttgtggtgagccccatgtgtctgagtacactgaaatgaattctgatggaacaacattctagtaagaagcaggatgtccaggagtcccctcttctacaaaacatctttcaaagaagtttccacttacacacagataaggtcttggcaattactgcaataccttcaagacatctttcctattgtctcagtgcattgtatgtttctctcgtcatttctttcctttcttaattttttatgtctgaagagatgaatattcttcaaaagcatacctctgttgaattacttcctctaagtattctctattttcagcaagctatgaattcaacaatggctcaatccattcgggaatatggggaaatgggagacagtaaccaattattccaaagatgatcttcagaaaggatgacttaaaaaaaccagttcatcacaggagagaaacatatgaacagttttatcagttgagaagtagtatatggagaagaccaaagagttgggagaccactcagccctataacagacactccctgctttaagctatggaaatacatgtaggaaagtatgactctaaagtattgtggctaaatggttttttacattcccatgtttcatgaaatataaaatttctttgaactggatcataaaacttaatactatataaccattttattcattcatttatctaatcaactagaatttatttcaatatttaccaggctccatactaggcacagaaatcatgaggctgagcaaaactaatgagtcctggtcaaaagagttttgaaactgaaacaaatataagtcaacattaagcaatggcctactgtttaaaagaatggcttattagttattattcctctccaatttttagttaatccaacaccctcccaagctctctttctagactagaggaaaaccttctttttcagaagtgttaaccatcattgggaatatttgtcactcaaagacatactgagcttttcctcatcaaatccatagtgttaactgaaatagagtgctggtgaccttcccagggtgcttcctataattgtcagatgcatcagcagtggtgtcaaatgaggggaaaatcttaactagggagagcactcatgccactaaaaatttattagtggaaaaaatcaaagatcttgacagaaattcaaagtcagagaccatgataatttctgggtcgtctggttatcctgatgtctatgaagaggtgggttatgatagacatagtccaagtcctagggtaaaagcccagcgagcagagcaagagtaaataaatgccttctgatggaaacaatgtgctgcactcagatctcccttcggtgttgctagtgatcataacaccaagcctctcatctgaccctctaccatattcatgaaggaactgaattggggttactcagagaagatccttctgtgcatcctactgagaaattttccagggcaaaatcacatgtggtgatattctaccccattccaccaaatctcacaagtttagagaaatttcatataggcccttaaatctatcgtctacattgagttaggaaggaaattactaactttggagtctaacagtcaactttttagatttttcaaagagatgtcacaacattgaactataaagagaaaacagacctgggtgacttaattcagtaacttgatgggtctcattggattataaattggcttctttcagtttcagagttttctattaacctcccaagttatataactaggacacaccacaaaaagttagtactatatttgtagtcaaaatgttcaaatagcaacaattctatatagtcccatctagtaggcaccctgagaaaccatctcacagtcagaacagtacaatatatctagagaaaagttatagctgtaggagtcagagtagacagataaggtgcagatgatatatttcaagaggagataaacccttccagtggaaacagactatgtttcattgatctctttctccagtgtagtcttttggatatcatcctccatggatagattggaggaaaggatggaaaggagaagggggagagatgacaatgaagttggtagagagagaaaaagggggacaaaggagaaaaaacggacggaagagtcataaaaagaaggaaagaggaagggcaggaatggaagagtgctatatcaatttataatggtgcccatgtctttattagtgtacattagttatatgtgatggatttcatcatgacactttcatacacatctataatataattctatcatttccccatgactctctcttgtttcccttcctcttttgcaattctttcctctcctcaactagatcctcttctagcttaatgttttttttttttaaataactcaatgagtttctttagagttgcttatgaaagtgtgtgtgaagggttgtttacaggaacttgagcattttccctgtggctttatcattatcactaaaggaaatgtctctcacggggctagagtcaaagctccactattaagagcactgactaagctgggcattggtggcacaagcctttaatcccagcactggggaggcagaggcaggcggatctctgtgagttcaatgccagcctggtctacacagtgagctccaagacagcctccaaagcaatacagagaaaccctatctcaaaaaaaaaaaaaaaaagaaataaataaaaagagcactgactgcttttccagaggactgaggttagattcccagcatccacaaggcagctcacaaccatctttaactttagtttcagggactgggtgctttcttctggcttccagggccacgccccgggcacacaactggtgtacagaaatacatataggcaaaatacctacacacataaaataataatgaacataaaatatttaaaaagaaaaaatgtctctctgatacacacatccatcaataactatatgaatcttaacagaagggtggggctccatgacaaaacatcaagcaacacaaatcttttatgtagataatcagagctgctgtgagttcagtgcagattttttagcttctaatacttaaattcagttagcatacagtaacaagattttattttctgcctcaaatagcatgaagttccgagtcaaaaattgctggtctccatctaaaacatgctggttcatagggtaaaaaatggcttcagcattatgttcacattcaatgaaggaagagggaagaggcaggaccagaaatttctgcctctcttttctttcagaacagaaaagcctgaagccctccttactctgtgaagaaatctatgataccttgctagccaaagctgtgctgcatgagcatttacatgagaaagatgctgaggtgatgccaatttcacaatagcagtgctaagtttctgagaaacacatttcagtcttcagtgaccagctctgtgactcttcagagctgttgggagtgagggagttgggtcctgggtttggttgctttctgtgttactgctgaaagatatctgccttctgcttcctgcgtttctgcatctctttaaagggaatgctacaggtccccagtggggtccggatccctctcccctctaacatttacagagacagagcaccctggtgggccaattcaacaatcttgttctctgagttattcttgaagaaacagcctatagcctgctcctgcaggccttggtggttttgcaaacacttaattacatctttcaaatgtctttctgtttacaacagctagcatggtttttgctttctgaaccaaggctctagctggtgcacaagccagtgttttgccacaggtagtcaggtggaaagcaagctctgcagggcctcagcctctgcccaggcttgtcaagaaaaaaactaacaagaactaatttcctcagcttccccgagctcgcacaagtgaacacatatttacttcccaggcacagctttagtcacacagatctgaacctttggaagtgtccatgcttctgacattactgctctcctgaacaaatgacacttgttgtgcatcctaaggtttcagtgtcctgctctctttagttttctttccattgaacaaaatgatttcaagaatcatacttggatgcatgaatgcatctcagggtattcattttccaggatttataatcatttttggaagctctatgtctacagaaacacagtgtgcttgatatttgtgagtttctcctctcatagtcacctttgatgggcagagacagcaatagtagatagatagatatacagagatgccttcctgcaactacattttggctagggtcagttgtgtatgggccatgacacaaggacttgagccccaataccaccagaaaagaagctcatctttggggcaaagagatgtgtacactcaccactgtgtgcccagaaccttgaacaacaactgagatgtggtagctggctgtcaaatatcctctgaattaattaatgttcactgacacatcagtgaacactccccacataggtgccattagcatttagtcatcaagacaagtcagtgaagttgatgctctcttcactcttctctatgagtatgttagccctttttttctagacagtttgactggtggaactgctgagttaaactctggattcactgacttgcagaaatccaacagttacttatgggaaagggagtaaagatatcagctatcaaagtgggctagtacttttcttaggttcaggtcagatctctgtgtctttccttcgcatgggtatagaatgtaccacaccaagttctttttcagtgtggcctctctgtaccatcttttagagtttcctgaagaaaaagagggagggagagagggaaggaggagagagagagggaggagatagggaggagggagggagggagagaaggaggacaagaaagtgataaaaagggcttgagtaagcgcgtttgtcactaaacctatgacttgatttggatttccacaacccacatagtggaaggagagaactaactcctataaactctcctctgaccttcacacacaggccagagtgggcacacatccacacacactgaataaacaaataatgtagaaaaaaagaagaaatgcacaaggtttcctctaaattggctccgtataaaagtgtaacagcactgaaggaagttaacactgtgacttatctaggactcatttctggactaaagctcctttcaaaggttagtatctaaccttagtggtaaagtcttaaattccatttctaacacagcattgtattatttgacacgaactatcaacagattaaagaagtgagtcacccaaagcaattatccaacatgacaaccacagccaattcttaaatagtactaaaattataatgagatgaacaaaattacaatattcaagaaagtatacttcaattagatgggctttagatatcaactgggtgggtgtatgtgtgtgtgtgtttgtgtgcatgcatgcatgtgtaatattttaggagaaccccgttgccaaagaacatgcttaagtcataatagatattctctaaataccttagtagtccttgttagttatttttcttgttgctgtaacaaaacacccaacagaagtaatttaaggagaagggatctactatagctcaggatttgagataacacagtccatcataacagaaagaacacattagttgagagaagattcaacgatagtgagggcatcagacagctgttttctcacatataagtggaacaggaaggacatagtgggacatgtcagcacttgagggctgcctctcttccttttcagcctgggcctctaaatcataggatgttgttattcacatcagggtaggtcttctccctcagttaatctaccctggaagtaccctcataaacatactcaaaagtgtgtttcattaattcttcaagcaagttgatgatgttcaaaattacccattacatagtctaacacacaaatagttctaattttacacattttaaaaattagctatgtgactttctccatcattttccatgtgaacatgctataattacccaaagtttgatgggcattggtagatcaacgtcaaagaaggcagtcataagattggcagataccttagttgtttgctaaatcgtggcataaatttttagctccttaccaggtcctggtatcctcacaccaagagggattccagggcctgtgaaaaagtgagcaggaatctgcagtgcttcctattacttgtttctgacatcacactataacacttccactttttcctactcattaaaagtgattcatcaagtccaggccacactcaagggatgaaacaggccttataatcataagtggacaatgcttaggaccatcactgaggcacactttcaatttacccttccctccccagcaacaactcatttccttctgtataactatgcaatggccatttttaaatactccctgagtcagacatgttagcacatacctgtaatcctagcacgcaggaagcagaggcaggatgagcactgccaagttaaaaggtagcctagactacacagtgaattccaggccagaaagagctatgtagttagaccttatatttttaaagtccccatgttttaaaacaaagcatacaaagatcagtaaataattaatgcttcccccaaaaaagtaccaagccctgattgttttacacatgattttaataaaacaagtatttcacaaaaagaatgtactgatgattgcctgcaatctgttccagataatagagaaaaaacattccccttccaatctttgaatgtacctaaccctaataccaaattcatattggaacatcataagagagaaacatgaaagaacaatttgtctaatacatacatacatatgtatattcaggagaaagaagtatgtgacttagaaggaattattatctttgctactgtgacatgtgacactgtgtatttgtcagaactcttagaagtatgagacacaaagaaggcatcctgatgtggaaatgctcttcacgtattgataacatgatagagtaatgcaaggaactgatagtaggaaactctgtgccatcagatcagtttgtgaaataaaaacctctccacaaatacatcttagtaactctcaaaactatatcatcagttaataaagttctaagtgcattactaaaatctgcatggtctatcttactggagaatgtccaaacctgcagcagctatatgactactcctcctgactcctctttgcctcccctccccggcattctccttgtctggtctccccacctatacttcctgcctggatactggacgatcaatgttttattcatcaaccaataagagaaacagatatacagaaggacattcccgcatcatgtacctcccccaactcagtcttcttgatcccttagggtcccaccctccatcccctcccttctacccatcccagcttacccaggagatcttaactctttccccttcctagggtccccttacagtccccttgttacctagcttctctggggttgtggaccgtagcctggttatcctttgctttatatctaatatccacttatgagtgaatgcataccatgtttgcctttctgggtctggtttacctcactcagagtgtttttgttctagttccatctatttgcctgcaaatttcaagatgtcattggttttcaccgctgagtaatactccattttatatgtttccatgttccaaatattatactggattccatatgtaaaattgactcacccaaactctgaagcagagctaagtgtatagctcaggggtgaagcaccctcctagcatgagcaaggtcttggtttccaccagctgatcgacaaacaaaaccatcttttcagtgtcacaagcatttaatggatatatactacagttattagaagatagcagataagcacttagatgctgagaatttatatacctgtggaggggatcacttggaaatggcaggcatagaacagaggtcagcaatctagggtaactctccatgggcttcatctctaccatacactgacaactggaaaattgtaataaaatatcttatattcagaaacaataaagcattgcacctaccatttgataaccccccatttgaaatctgaatggtgacttatccccttccctggactctccatcatagactccagcaaccactcttgctgtccaagaactgcaacactgtcttccagttgaagcgtctgtggtgtgcattcactgaaagtcatgaatgccattgtcctgaaggcattaaatgcagcagtcataaatatgaagtaacatttctttttttgttttgttttggtttggtttggtttttcgagacagggtttctctgtggctttggaggctgtcctggaactagctcttgtagaccaggctggtctcaaactcacagagatccgcttgcttctgcctcccgagtactgggattaaaggtgtgcgccaccaacgcccggcatgaagtaacatttcttattgtttatccctgttactgtaacctcacaacacagggatggccatgagaaagtggtgctctggatataccaaacagcacagtgagccagtagactcttaactgtgactgctcacagtgtttggtttgtgtacaatgttgcatccaaattcccaccctcagctgtccacagttctgcttcaatctttcttttttccaaaaaaaaaaaaaacctcgccaggcgttggtgccgcacgcccagcacttgagaggcagaggcagaagggtctctgtgagttcgaggccagcctggtttccagaggaagtgccaggataggctctaaagctacaaagctacacagagaaaccctgtctagagaaaccctgtctcgaaaaaccaaaacccagtacctgatctgactttttagtttctagaaggtcagtctacctacttcagatttgctattcctatcctacttaggaagctctctctctctctctctctctctctctctctctctctctctgtgtgtgtgtgtgtgtgtgtgtgtgtgtgtgtgtgtgtgtgtgtctgtctgtctgcctgtctgtctgtctatctcctgtcctctcttctccaagacagagatccccttcctgaccaagataactctccttgcagccagcagaatatcccaaaacaaggtgcttgtttttagcaccttctagagcaaagaataaaagtttccatcaatgaaaatgaggggtaatggtctcttcactgtagctggagtttttatgtgtcccacccagtcccacaaccatttataaaatattcattcagagacttaatattaattataattgtttgactaatggctcaggcttcttattggctatatcttacatttaaattaacccatttctaatcatctgtatattggcacatgccttgtggcttaccagtaatgttctgatatcttactcctctggaggctacatggcgtctcctcgactccacattcttcctgtccttatctctgtttggatttcctgcctagctatattctgcctgggtattggccaaatcagcttctttattaaccaatggtaataaaacatattcagaacatacagaggggcatcccacatcactttacaaggtacaagatgtagtaaatagaattttcctaccattcattttaaaaacaaaaatcattattatccaccttatcatttagtaggatagagaatcagatttttgtgccagaagcatggggctagtccttcaacaatttaagaagtaacctcctggcccagaattacactttccagacccttttcttttaagcatagacccagggattgttcctaccaaaagtatgtgtgcagaaataccatgcacaacttccaggccaccatggtaaaccccaggggagtttttcatgattgccttttgcttgtcttcacctgcaggcagagccttcctcagaaggctgtgaagctctggaaatagcagagccatatgatgcaagatccttgaaatgtgacttggaggagagcctcctgacaatcaggaacatgcaattgtattttaaacaagacaaaaataatttctcatgatgttaagtcatgagatgtttttatagattattactttaaccattctgaatacttgtgctgtttctcttcatttttggtttgttcttagccttttggcaaagtaaagttgcctaaaaacagatctaccacacaagatagatgattggtaagtatgtatattggttagttttgccaacttaaaaagattataattacctggaaagacagaatctcagtatcctcaattgtttccatcagatttttcagtattcatatctgtgaggtatttctttaactgttagttgatggagagggcacagccacttcgggtgttactatctgtaggcaggtgacctttagctatatttaaaagaaaaaaaaaggtagctgaagcaagctagagcaaatcagtaagtcacattcttccacggtttctgcatcagttcctaccttcaggttttgcttgtgttcctgccatgacttctcttaataatgaagtatgacatggaaatacaaagccaagtaggccctttcctacccaagtttgtttgatgtttatcacagcaacacaaagcaaatcaacacaaagcaaatgctgagcaaatacaaaattctcagagttctcaaatatattacatctccagaaaccttttaatttaaatgcccattcaactagaaggcaaacttataaagattgcagtatcaaaataatagtatctattttgaaaccctcaggtctttttcttcctgtcccccgaccacaccatctgatctgtttctgctgctactgcgaggtactacctttggaaagccatggttgttcccccaaagaaaattttgcttattaaactgcctgtaatcccccacttagttctattagcagacaaatcaacctgattgattctgtctcagaactgccttgatccccaccatttggttatccccaccaaaatttgagatcagcctcttttctcttcacctatagattttgataaagaaaatggacttgaagaacacaaaagtagaagaagcaccatgacatattctaggaacaagcctgaaataactgaaggaggaagaaacttcaaagttgtagcacagcttcttatgtactgaccttgacttttcttatactgactctagttagccattttatgtctggtttctcacttctcttgtacattccactacctcaaaaacattctcctataccaacaagtatgaagtccaatatgtattatgtggtataaagtactctgttatattgcaattattaaacattgttagtatacatatcagtttctgattctctgtagacactatcttcggtgtctattcttcctctgtcaaaagacaagttttattcatattttcaaatccaggaaaaatgttgcttcttgaaacctccaatcactcttcatatctatctatactgatggttattaccctttgttaactgcatttccaaaattctgtgattactatctgcataacactggcctattggggaaaataactagattactgtctctctaagaagtactagggagacattgtttctgtatttctagtgctagcccccagcacctgacactgaaatagtgaatgtgatatttttattgaaacaagtcaatatactacaaaggctttagcaaaatcacaaaatgaaacacaaaagctcggggaatggcaaggcaagcagctcagcaaaagaaaaatctcttgaataaacatttcttcaactggaaaaattattaatgacaattattccaagcttctggaggttgccaagagtacttgtagtgtttttttttttaaatcaaactctctaaatgcttaaataaggacaaatttggggaaaacagaaaactgtgacattttgcatagttctgtacccacccctctcccactccactctgcattatagaagacctattgctggtggaaatgacagcaggagaaacagatttcttctccatcagcttagttgtgcatccaacctaatcaagtagagtagaagtcatgcatatccccactcagttcctgcaccacaggaaatttcgcatgtgccagttaatggagagcaaactccattcctaccacccttatttccagctccatacaataagcaggcattccctatgaacacaccagttgagtaggctagtaaaataggcaacacacagccaatacacttctaaaatccaaggaaacagaaaccaaagaacaaaacacctgcccaactaagacaaacccagaaacctgcagccagacctataatcaccccaaacccatcatagatgccagcataagaacacaatcaataacagccaggataatgtctccattagagccctaccacaacaggcccttattataaaaacatagctgaagcgtaagacaaagaccttaaaaccacctacttgaagatgatagaggtacttaaagaggaaatgaattaatcctttaaagaaagtcaagaaaaaccaaaataaagtgtaatgaaatgaatagaagtgttcaagaactgaaaatggaaatataagcaataaaaacacacactaggggaattctgtaaataaaaaaaaatgtaggaatttgaacagaacctacagaggcaagatttaccaataaaatgcaagagttagaagagataatatcaaacattaaagatatgatagcctaaaaattttttaaaaagaaaattttcctaacctaaaggagatgcctgaaaaggcacaagaaatataaagaacaccaaatagattagactaaaaagaaattaccccaccacataataatcaaaacactaaacataaagaacaaagaaagaatattaaaagctacaatggaaaaagattaagtaacatacaaaggtcagcttactagaattacatctgacttctcaatggagactaaaaaccagaatgacctacacatatggactgcagactcttagattccacagatgcaagcctagactactgtaccagcaaaacttttgatcaccatagatggagaaaaaaggatattccctgatttaaacttatctatctacaaatccagccctacagaaggttctagaaggaaaactccagcaaaaccaaaggaaagaatcacacacacacataacaaaaacaataccgaaataacaggaatcaacaatcattgaccattggtatctctcaacatcagtgctctaaattccccgaaaaggatacatactaacagaatgtacacaaatacaggatccatccttctgctgcacccaagaaatacacttgaacatcaaggataaacattaccttagggtaaaagtctgaaaaaaatattccaagcaaatggatctgagaagcaagctggtgtagccatcttaatatctaacataatagctttcaaaacaaaactaaacaaaagagatagggatggatacttcatactcatcaaaggaaagatccaccaagatgatatttcagttcttaacatatatgcctcaaacacaaggcacccacccttgtaaaagaaacactactacagcttaaatcacatattgaccctcacactgcgggagacttcactacccaactcccagcaatggacagatcattcagacaaaaactaaacagagaaatggacattataaaaccaaaatgaacctaacagatattcacagaatattctacccaaacacaaacgaatatgccttcctctaagaaactcatggaactttctccaaaatttaccacataattagccacaaagcaactctccagatatacaaggaaattgaaataattccccacatcctatcatattacaatggattaaaactggacaccaacaaaaaacacaaacaacaaaaaacctacaatttcatagaaattgagcaactctctaccaaatgaaaaaattgatcaagacagaaataaagaaataaattaaagactttctagaattcagttaaaatggagtagatggcgagggattaaactgagagctgaaatcaataaaatagaaacaaagagaagaattcatagagtcaatgcaacaaagagtttgttctttgaaaaacacaagatagacaaatacttatcctaaccaatcaagagactgagagaaactatccaaattaacaaaatcagaaacaaaagtgggcatatagcaacagacactgaggaatccagagaatcataagcatacaccttaaaaacctgaaatccaccactctgggaaatataaaagaaaaatggattttttcaataaatcaagagcaggtaaatagtttaaatagatactaacaaaaagttataggccaatctcactaatgaatgtagtagatgcaaaaattatcaacaagttctacgaaccaagttcaagaactcatcaaaaatatcgtctgccatgttcaaattggcttcataccagaaatacaaggatcgtttaacatatgtaaatcaataaatgtaatccacaacataaacacattgaaggacagaagccataccatcatcttattagatgtagaaaggccatcaacaaaatccaacattccttcataataaaagtcctatatagctgatatatccatttcaacataagaaagggaaaatatagcaagatcacagcaaatacctgctaaatacctgctaatacatgctaaatggagggaggaagcattttcactaaaatcaggaacaagaaaagtttgttctcaccctccattcctgtttagtgtttgaagtcttagctagaacaatcaggcaaatgagggagatgaaggaaatataaataggaaaagaagtcaaagtacgttaatttgtagactttctgattctatatgcaaaaacaccataaaaactgccaggaaattcctaaagttgataaacacattcaagttggatacaaaatcaatatacatgaagggccagaaagatttaagaaccagaggaccaggacatctgctatgagacagtgccttctatatgtgataggcatgatacactcatgaaatttgaacaatatggttggttgcctaaataaggtatacacaatgacattagttggcatgcccaacatgagtctgatgaatctcacaaagctccatctctagatgagaaaccactttgagatcttcctacctctcccttttactccaatacaatattccaataaagacagttggtgaatggtcaaaaaatagtcttcctatatacatacataataagagaaatcaaagaaacaatcccattcacaatagcttcaagaaaaggttaaaatgtctagggataaatctaaccaaggaggtgatttgtacaacaaatttaagatgctaaaagaagaaattgcataatatgctagaagacaaaaagagctctcatgctctggtagcattcagacgatgatatggccatccttctgaaagcaatccacaaattcaatgcaatcttccataaactcatgaggtaattaatcacagaaagtaaaaaattaatcttagcttccttccccctcctctgccaacctgacccctaccaaggagagtgtaccctctgctcctgccctactcctacccaatatcccattcaccccgatctctctgggcctgcatctgcttatagtggacccacccagaaagggaggagctccctgagtctggaaacacctcactcttcgttccccttttgctggcttgacccctaccaagcctgatgcctaccaagtgagcagactaccaggagaggcaagaccatccagagctgcagacattgaagtcttggaccacacacaccaccgggtgacaagaggagatacagagaccccacttgcacccactggaagaagagatgggaagaagacaaaatatgaacacactcaacaacagaaaggccaatatgacaccaccagaatctaaagactccacaccagcaagaggtgaaaagctcaacacagaggatgaaaaagacatggaactcaaaaattatcttaggaagatgatagagacctttaaagaggaaacaagaaaatcccttaaataaatagaagaaaacaagcaaaaaattacatgaaatggaggaaaaggaaaactaaaaaattcaagaaataaacaaatctcttaaagaatctaaagcaaaccaagaaaaaacaaccaaacaagtgaaggaagcacttgaaacagttcaaggcatgaaaaatgaaatagaaaaaataaagaaaacacagaatgaggggatgctggaaatacaaaggctggataaacaatcaggaactaaagatgtgagtataaccaatagaatcaagagatggaagagtgaacctcagttggtgaagactcgctagaggatatacagtcatcgaccaaagaaaatctcaagtccaacaaatccctaacacaaaatacccaagaaatatgggataccgtgaaaagaccaaacctaagaatagtagttatagaagaaggggaagaaatacagctcaaaggtacagaaaacatattcaacaatatcatagaagaaaacttccccaaactacagaaggatatgcctatgaaagtacaagaagcttacagaacaccaaacagactggaccacataaagaagtcccctcaacacataataatcaaaacaccaaacttacagaataaagagaaaatattaagaccacagaggaaaaaggccaactaacatataaaggcagacctatcagaatcacacccaacttctcaatggaaactttgaaagccagaaggtcctgcatagatatcctacaaacactaagggagcatggatgccaacccagactactgtacccagcaaaactttcaatcaccatagatggagaaaacaagatattccatgacaaaaccatacttaaacaatacatatccacaaatccagcactacagaaagttctgaaaggaaaactccaacccaatgaagataactacactcacaaaaaacataggcaatagataatccaattttaccaaaatgaaaagaaacaagaaggcgaaaaccacacacaatgatagcaccaccaataaattcaaaacaagaagaatcaacattcaatggacattaatatccctcaatgtcaatggtcttaacctgcctataaaaagatacaggctaacagaatgaatatgaagacaaaatccatccttctgctgattacaagaaacacacctcaacttcaaagacaggggttacctcagagtaaagggttgggaaaagattttccaatcaaaggggcccaagaaacaagctggtgtagcaatcctaatatctaacaaattagacttcaaagtaaaatcaatcaaaagagatgaagaagggcatttcatactcatcacaggaaaagtccatcaagatgaaatctcaatcctgaacatctatgccccaaataggaaggcacccacatatgtaaaagaaacattactaaagctcaagccacacataaaaccacacacacctatagtaggagatttcaacaccctgctttcaccactagacaggaccaccagacagaaacttaaaaaagaaacaaaggatctaacagaagttatgacccaactgggtttaacagatatctacagaacattccatcgaatacaaaagaatataccttcttctcagggccacatggaaccttctcacatattgaacacttatttggcaacaaagcaaacctccacatgtacaaaagaattgaaataaccccctgtatcttatcacatcaccatgctttaaagctagaattcaacagcaatacaaattgcagaaaacctgcaaactcatggaaattgaataacacccaattgcaccattcctgggttgaggaagaaataaaaaaagaaattaaagacttcctaaaatttaatgagaatgcagacacaacatacctaaacttatgagacactctgaaagcagtgctaagaggaaagttcatagcactaagtgtccccatgaagaaactggagaatagtcacacgagagaattgacagaacaactgaaaattttagaggaaaaagaagcaaactcaccacagaggagtagacaccaggaaataatcaaactgagggctgaaatcaataaaatagaaactaggaaaacattacaaagaatcaatgaaacaaagagttggttctttgagatcaacaagatagacaaacctctacccaaactaaccaaaagacagagtgagagagcacgctaattaacaaaatcagaaatgaaaagggggatataacaacagacactgaggaaagccagagaatcatcaggtcatactttgaaagcctgtactccacaaaatttgaaaatctaaaggaaatggacggtttcctggatagatatcactttccaaaattaaaccaagaacagataaacagttcaaatcaacctataacccctaatgaaatagaagcagtcatcaaacatctcctaaccaaacaaagcccagggccacatggcttcaatgcagaattctactagaaattcaaacaagagctgataccagtactccttaaattgttccacacaatagaagcagaagggacattgaaaaactctttttatgaggctacaatcactttgatacccaagatacataaagatacaactaaaaaagagaactacagaccactatccctcatgaatatcaatgcaaaaatactcaactaaatattggcaaatcaaatctaagaacacatcagaaaaatcatccactatgatcaagtaggcttcatcccagggatgcaaggatggttcaacatatgaaaatccatcaatgtaatccaccatataacaaactgaaaaagaaaaaccacatgatcatttcactagatgctgaaaaggccttgacaaaatccaacatcccttcatgatagagatcttggatagaacaggaataacaggaacatatctaaacatgataagagcaatatacaccaaagcaacagccaacatcaaaccaaatggagagaaagtcaaattgattcctctaaaatctggaacaagtcaaggctgtccactctctccatatcgcttcaatattgtacttgaagttctagctggagcactaagacaagaaaacgagttcaaagggatacaaattggaaagaatgaagtcaaactttcactatttgcagatgatatgatagtctacataagtgaccccaaaaactctaccagggaactcctacagctgataaacaccttcaggaaagtagcaggatacaaaattaactcaaaaaatcagtagccctactatatacagatgataaatgcaatgagaaagaaatcagagaaaggtcacccttcacaatatccacaagcaacataaaatatcttggggtaacactaaccaaaaaagtgaaagacctgtacagtaaaaactttgagtctttaaagaaagaaattaaagaagataccagaaaatggaaagatctcccatgctcttggataggtagaatcaacatagtaaaaatggccatcttgccaaaagtaatctacagattcaacacaatttgccccatcaaaatcccaacacagttcttcacagaacttgaaagaacaatactcaactctatatggaaaaacaaaaaggatcttctggaggcatcaccatccctgacttcaagctctattatagagccatagttctgaaaacagcttggtattgacacaaaaatagacagataaacaatggaatcgaattgaaaaccctgatatttacccacaagtgtataaacacctgatctttgacaaagaagtgaaatctatacaatggaaaaaagaaagcatcttcaacaaatggtgctggcacaactggattcggacatacagatgattgcagatagaaccatatctgtcaccatgaacaaaacttaagtacaaatggatcaaagatctaaatccagccacactgaatcttttagaagagaaagtgggagatacccttgaacgaactggtacaggagactgcttcctgaacattacaccagtagcacagatattgagatccacagttaataaatgtgacctcctaaaactgagaagcttctgtaaggcaaaggacacagtctgtaagacaaaacgacaacccacagaatgggaaaagatcaccatccccatatctgacagagggctgatttccaaaatatacaatgaactcaagaagctagccaccaaaacaccaaacaatgaaattaaaaattggggtgcagaactaaataaagaattctcaacagaggaatctaaaatggctgaaagacacttaagaaagtgctgaaaatgcgtggccatcagagaaatacaatgcaaaacaactctgaaataccatcttacaccagccagaatggttgaaatcaaaaagaccaatgacaatctacgctgaggaggatgtggagaaaaaggaacactcctccattgctggttggagtgcaaacttataagaccactttggaaatcagtatggctgttgctcagaaaaatgggaatcagtccacctcaagatcctctcctgggcatatacccaaataatgcaggttcatacagcaaagacatatgttcaaccatgttcatagcagcattgtttgtaatagccaggacctggaagcaacctcgatgccccgcaactgaagaatggatagagaaaatgtggtacatttatacaatggagtactactgagcagaaaaaaagcaatggaatcttgaaattcgcaggcaaatggatggaactagaagaaaccatcctgagtgaggtaacccagttacaaaaagacaaacatggtatgtactcactcatatatgaattttagatatagagcaaaggattactagcctacaatcctcttcaccaaaggaactaggaaacaagagggactctaggagaaaaatgcatggaccctggagagtgggaaggggcaggatctcctgaactaattgggggcatgagggtaggggagagggagctaccagaatgagaggaggagaagcggagggaagaagagaaaattgaggagcagaaatgttgagtttggggaagaatagaggagaacaggatgagagataccgtatcagagggagccattttaggtccgaggagagatctggcactagggagatatccagagatctacatggatgacacaaactgacaatctaggcaatggtggagaggataacctaaatgccctttccctatatggagactgatgattattttatataccatcctagagccctcatccagtggctgatggaagaagaggcagacacccacagatatacactgaactgaactctggaacctagttgcacagagggaggaatgaatatcaaaggggtcagtaccaggctggtgaaatccacagaaacatctggcctgaacaagggggagcacatcaaccccagactgttgtctgggagaccagcatgggactgatccagacccctgaacatggatgtcaatgaggaggcctccgcactctatggggcccctggtagtagatcagcatttttccctagtgtaagaagggactttgagagcccatcccacttgaagggatgctctccaggcctggacacatgggggagggtctaggcccagcccaggatgatgtggagcccccatcaagggccctaccctgccaggggagtggaggggccataggatgggggcaagtaggtggttggggggagagttggaggaggggagggagaagggattgacatgtgaagcttattcctaatttgaactaataaaaatatgaaaaatttaatcttaaatttcatatgcaaaactagaagacccagaatgttaagataatcctgaataatataaacactactggagatcacactatccctagtttcaagtaatattgcagagctctgctaatataaacagcatgatactagcctaaaaacatacagtgatcaagaatggaggatgcacatataagcccacattcttacagccatctgattttttacaaagaggccaaaaatacacatgagaaaagatagcatcttcaacaaatgttcgaacttggtagttatttatagactagaactagatccttattaataacccacataaaactcacttataaatagatcaaggacctcaacataagacccaactccctgagtctgttagagaaaaagtagggaatacactccaacgtatagacacaggaagagactttctaaacaggactccatcagcacaagcattaggatcaagaaatgaaaactggggtctcatctaactagaaagctgttggacagtaaaggatgccatcattagagtgaagaggcagcctgaatcatgggaaaaaaactttaccagccatacatctgatagaaggttggtgtctaggatacataaggaattgaaataaaactaaacatcaagaaaacaaacaactcaatttaaaattggggtatggaaataaacagagttctcaacagatgaaacacaaataactaagaggtttttttttttcaatgttcaacattattagccatcagagaaatgcaaattgaaactactttgagatttcatattgccctagtctgaaccgctgagattaaataaaatgacaacaaatgctggggtgcatgtgaggtaaagggaacacttagtcacagctagtgggcatgcaaactggtatagcctctatggaaatcatgatggaagtttctcaaaggctaaaactagatctacaatacaacccagctacactattttttgaacatttacccaatggattaggtatgctattatggagatactggctcatccatgttcatttttgctctacacatgataaccaggaaatagaaaccacttatatgcctatcaactgataaatgatgatgaaaatgtgcattgcagaatgtaatattattcagctattaagaaaaagaactttgtatgtaaatggatggtgctggaaatagtcattctgattgtggtaacccagacccagaaagacaaatatacatgatttctctcatatgtaggtgctaggtttgagtcttttgatatgtgcatccatgttaatgcacccatagaagacaggagattaataagggtcatggggtgatttgaggaaggaaagatccaatgcagatggtatgaagaaagactggagaataccagaagacaaaagattctgtgagatgaggaatagggatacgggtagaaggggaagtatgagatggcggtaactagcaccaaatacctgtagaaatgctgtgtgaaaccctactagtatagaagactcctaaaatatatacacatacaggtattaaaagaggtttaaatggaattactatataacagggggagacaggaggaagaatggtttacctggatatcataagttatcaaatagagagtccagttccaggaataggctacctttttttttttacttgtttgtcagcaggttcccatatactcccaaacattataggctattgtcatcgttcttgattaccctccagaacttgatggtgagactttattactgaagataccacatacttgagtcagaacttagagaaatcatgctggtaccaaacaagcttcatccctactggctgactctcagagtgctaaaaactgttatacaggatatataaaaagaaacgtaaccatccccacactacccagctgtgaaccaatatgaactacaatgaccagtctggactcctaatgatccctatattctaatagtctatttcactaagattgcatcaatgggttccactgataaattagtcccctcatgatccactgccctttcaatagtgtcatcagtagggcatcgaatctttaacacctgagctatttggagtgacacttcatattcaaatcagcaacttataggtaaatatgcaagggtgaaatattaaaggtactattgaagtactatagaataagagatggagtgaccagttttgcctgaatgaggtagagaatagacaaggagaaagtaactgatgtcattgctgctgctgctactactagtgatgatgatgatgatgatgatgatggcgactgtaatgataaagagcagagagaaaaagaaagaaaagaagtaatgggaaacaaaagaggaagaagaagaaaaaaagagaatgaggaggaagaaaagggaaagagtactaccattatcatcacctgtggagctgaaccacttcaaatctattttacaccactgtctcctctactcacttctattcagtctcatagactagttgtcatttctcagccactccagaaattttctttgcattgttttattatcattttggtttaaatatgtgtagatatgtatgagtatgtgtgtaaacaacattgaaatatgaaatttacttcctactgtgaatttttgacaaaactgtgttgcaaaaccctattacagagcaatagatatgtgactttggtaaatcagagaattctttgaaaaatctgattctgaaattggagaatacacagatggtgcctgaaattgcagtattttctgtccaggttcagaaaaaattctcaaaaggtaaaatgagttccaaaatccactaggagcctaatataaaaagtatactggaaattgatcctcactgagacattgacatcttctattgatgccccattctgacaagtaagagaactccagaaggagatgcccctgttcctatgacctttaacctctaatagcctattgacgagaaataaaaacataggtggccaaatcctgtgtctcaccataaacataaaagcaaaaaggaaaaagaattgacatgaggctaaaatagctcaaatgtccccaaaccatacaagtgactatcagaatatatctcccaattccatctcacactggacatacccaaaatttgtcttaatcacatgaataatgaccaacttgggaaaaaataagataaaggcatagaggagctttttgaaaaatatgtgtccaaaaagaggacacatgattaaaaacaaacttttgacctctccctcccactccattccaactaacccatcagagaagacaacaggacatttaagatatttgagtcattgaaaattatagttggcatttatagtggtgcactcaatgctatttgcacacaattagccactgctgacccaaacatttactgctcttccatggaatggtcattctcaaaagctttccaaagagaaaagaacacctgagacgaaggtgtcacttcctgaaagaagctctcatctgatcttcattgtagccatatcgagactacaaaaataatgtggttttaaaaagattggtttcttctgacattagtaaagtgtcctccacctaaatacacaccatctgagtggtcagccaggatgagtccctggaaacaagagcctttcttggctgaaagtctttattttttcaaccatcaaatggtaagtaacactttttgaaatgcccattaaggatcaaataatggaactgagaggctcacattgtccctgggattccttaactgaagttactcctgccatcatcaccacgaggctagcaccactcaaagaccaaagtcaagtgctgaaaggccaggtgaaataagagtcagaaaaaccttcaatcacaatgcttgcccataagaataagtcatcaaagaacttctcaagagctgctgcacagtggcaatgagctgcagagtagaaatcctagcttctgccctcttgggggcactcaaggagaacagcctaagtgcttcagtcaatttacagcaaagctctctattttgtccacttgtgagataaaaaatgttggtgagcaggaaaaacattgccctagactaaaggtctcctgatgaaatgagtaaatctattaagcaatcctctgtccacagctatgtgagtgtctatgtatgtggcctctgtgtacctgagtcagtaaacaaaagggaactaccagtgagtggtgatcacgtaggccctggatagaaggcttcttttatttttaatttatctatttgggcttacatgagtcaataatggcataactgtgcaagacaagaacttttgaaagatggagggatagacacaaaatgatgaaatcctcaacattatgatgacaatggttgttgatataagaaatgtaaactaagcctatgaacttatatgcagtgaatagatttttttatttcaagggtaatactaatacagaaaagcttcataataggatgacacaatagtgggtcgctactgtgcagaaatgttaatggagcacagatgttctgtgggctgctgttatgtatgatgatatattgtttatgatttaataaagcctcactggagatcaaaatataaagctagctacagccattgagccaggcagtggtgatacacacatttaatcccaggactcttgagacagacagacagatctctgttagctcaagaccacactgagatatatgaaatccatccagtctaaaacagatacagctcacgcaaaggttatctcggcacttgggatcacatgcctttaatcccagcacctgggaggcagaatcaggtggatctctgtaagtccaaaactatcctgggttacacaagagtgaatcagagcttacacctttaatcctaggatttgagaattatttttttaaaaagaagcaaagggtctcatatgggatttagtttctagacagggaaggcataggattgcagtctgagaagagaagtgtagcttggagatgcaatcagaggacacaatcacctcttctgtctgagcattggtagaggtaagaaatctctatgacttggctgcttttttctatgattttcaggttgaagcttgaagcttgaaccccaatatctatctctggatttttatttttcctgttacagttatgatcaacaatcaagaaaggtacaacacactagtcttgttcccaaggtctacatctcatcagttgtttgtggtttaagatgtcaaagaccaagaaagttgtgaagatctttcatctgtgaggctaaagaacactgtagagtaccaaccagtgtgtatgggcgctcaactagccactgtgcttggttctcagtgatatcactttctagtcaaaatatagaagactgcacacgcagatgctaatgataccaggcaaggggaactatacaacttctgtgaggctcttgatctgtattcttatgggtttcaaatggcaatgaaatgggtctgtagggtagagaaggtcttcagatgtggattcttagccatgggaacaaagacggcatgaggaaaaacagaatgataaacatgacacatgacactccagaaaaatattcttccaaatatttatatgagaaatctagccctgtttcctcaacatctgtattctctatcactgtaggctgagaaataatttcttggcacagttaagggaattttttttcttttcaacatattcaagatacagggttacacagagtccttgccatcacatttttcttttttgaaatttccttctcccaaatgtttgtgtcatgagagatcatgagtagcaaaaagattattgtgacaagtgagttccaatcaaaatgcaattttattaaaaattatattagaaatgatggacaataattcttttcaatgacaaaagctaaattttaaacttaagaaactgtgaaaatgaatatgtcaaaaagaaatgtagggatgtacaaaagtaaatagacaaaaaggtagacactgtgacatccaagtgagtcgcttcagttgaattctgaatgtgaaagtgagaacctagtgagacaacattatctggatgcctcactgagccctagagtagaagataagtgacttagcaggggttttcttttataaatgaagccttaaattaggaacagagagctgagatcaaagaaagagtctaccatgtatcaataggacccagaaagtgacaagccagtttgtgaagaccctgaaattgggaaaggcagtttgtaccatcaccacagtacctggagcccagatttagtttgaaagaggcactttggaaaagagttgtccataattgttgttattttatagtctattttgtattctataacagaaagctacagattgggttctgtaatcaataaataagagaagagtagttggctcattgttgagaagtcaaagaataaggactgcatctgtgagggccagctttctgttcataatatgatagaagtcaacatataataaaagggaattttaaaaagagtaaggtctgatttccaaaatatacaatgaattcaagaagctagccaccaaaacaccaaactatgaaatcaaaaagtggggtgcagaactcaatagagaattctcaacagaggaatctgaaatagctgaaagacacttaagaaagtgctcaaaaacctaggccatcagagaaatgcaactcaaaacaactctgaggtaccacctcacacctgtcacaatggctaaaatcaaaaacactaatgacagtttatgctggagaggatgtggagaaaggggaacacttctctactgctggtggctgtgccaacttgtacagccactttggaaatcagtatggtgactcctcaagaaaatgggaatcagtctactacaagatccagcaattccaatcctaggcatataccccaaagaagcacattcatacagcaaagacatctgttcaacgattttcatagcagcactatttgtaatagccagaaactggaagcagcctagatgcccctcaacaaagaatggatagagaaaatgtgatacatttacacaatggagtactactcagcagaaaaaaacaatggaatcttgaaatttgcaggaaaatgaatggaactcgaagaaaccattctgagcaaggtaacccaatcacaaaaacaaacatgatatgtactctctcgtatgtggattttagacatagagtaagggattagcagcctacaatccacactgccagataaactagtaaacaaggaggaccctaaaagagacaaactttgttccctggagaagaggaaagggtcaacatcccctgagcaaattgagaacatgggaagagggaggaggaagctacgagaatgagaagggaagaaaatgacgcatgcagaggtcatgggggagcagaaaggttgagtcaggtgtagattagaagaaaggatatgtgataggtagggttttagtcgagggggtaatagggaggaagggagggagaagggaactgggattgtcatgcaattcaatcttgtttgtaattaaaattttaaaaagtcaaaaaatgaaatggaaatattaaatccaaaaaaaagagtaaggtagggccaaatgtgcttttataatatggccacatgtacagtgatcacactaatccataggaaaaagtcctcattacctacccagctcttaaaattatcacctcttaacactgcaacactgaggaccaagttttcaatacatagactctgagggacacattcaaatcataatattccacttgcctcccaaaatccaccgcattttcacatgcaaaacatgttcatctcattccatttagcctccaaagcctcaactcattgcaacatcaactcaaaagtccagagtccttaatcccactaccactagaaatacctcagaaaataattcaaggagagatttttgtgatcaagagtgagcactatacttatctgtgggcctaaggacaaataattagaacataattagggaatgcgctcatttagtaggcacaaacatgaggttagcatggacaacaatagacatgctaaattggacaggggaaagcccatgaagcctcagccatacacaaagtaccacaggcaactaaggaatgcggaaaggaagaaaaaaattaccactagggaagaaaacaccgattggttatgcaatactatctcataagaatggttttccctctgatttttaaaaacttattctttgagaaattcatacatgcacacaatgatttccagtctcattcaccaccacccccactccccaactctagattctcctcctaaatttctctagtatttacacctcctaactttttcttttcttcttatttttttgttttgtttggtttggtttggtttctttctcaagacagggtttttatgagtagcagccctggctgctctggaaatctctttgtagaccaggctgacctcgaactcacagacatccatctgcctctgcctccagagtgctgggattaaaggcatgggcccccaccacctggtttcctcctaacttcttgtctactttactatagcccactgagtccaattagtgcatggttataggatcatctacaaaggaccatacctctaaagacaatggaatctcccttcctttaccatccttcagttgtcagtagattctttgatattcagttccatatgcaacttcttcagaatgtcattcactgtctgtgtccccaccaggattctgatcacaaatgatatataatccccagactttccctaaagttatgtgcttccctcttaatcacagattccatccttaaatatctccccttcttgttactttactataaacagccaaaagaatccatgacagcagcttgaatgcttaacgatatagatattttctctctcagataccccaattcattgctcctgaattctgacttttataaaacccagtttacaaataacagaagtttgtctcaaaattatggaggctgggaaatcccaagtcacatgtgatgatggtcttcttgctacatcataagcaaggcatcacatggaaaagaagtacacaacaggatacaagaagagaccagaatcactttttttactaactcactcttgccatagtgatatgtagacagaagtttctgtccagcctggttccgcagctgtttagtcccaaataaacacacagaggcttatgttaatataaactgtttggcctatagctcaggcttcttataggctatctctctcttaatcattaacccatatctattagtctatgtatctccacgtggtcttggcttactggagaatgcccaagcatactatcttcctgatagctatatgccacctctctcatgactcactctctacattcctcttcccagcattctcctggtctggtagacccactgtacttcctgcctggctacatcatgcctgtctattagctgaaacagctttattcatcaaccaataagagaaatacatattcacagcatacaggagggcatcccctatcagtgatctgaattcattcatgaggatagagttcagtgaactaattactccttaatggaattaattggacctagaaactaaaagcctagtttgtgaggatgccagagctggggaagagaagtagaagtctaccagctgcctggagcctggtgtttaaagtctgaaagagaaaattggctaaaagttcagtcacaatctctgtatgaaatattagatcatgagaaaaatagaacaaatcactctgttagaaagagacaatgggaatctaagtgggaatacacactatatttaggactccccagggagaatctggttttttcatttgtcccttgtcagaattactgaaacataggaagcatctctccctctctttcaactatcatcccgttaaagttgaattctgccatgctcactttaagaaaattgttcttgcaaaggtcagagatgaaatttttattgctacatccagcatcctttccacttagatctctctggtgcagctaatactactggacactgctttctgggaagctgcactagcttggtttccatgacaccacacacatttgttctcccagttgccttcaaatctatgaacgtaaatgttccctcaaatcagtgctcagccccttgaccttctctattttctctcttccactgcaggagacaatcacttgtttcatcattacttatagaataattactctgaagtctgtatttctaaacctaagtggcaatcacagatctcgaactctccattgccttttcttctcttagttcacactatcatttcaaggttagcactttggacccaacttttgcctccatctcctcccagtgggctctcccctgtcggacccacagcagtagcatcttatctttccaaatgatttgtgctacattttggacatagctcccaaagttccaacacatttccccaaaatcatgtgtcaattggggccttttggaaatgattagttaattgtagattatagattactggttatcattaggtgcctttattattaaaagcaatctttctctggcatgctcactctgtttcacattgttaccttttaccatatcataatgcagtaaaaatgctctctccagaggttagcaccatgctctgagactgcccagagtcaataactgttaaataagcctctactcattataaattactgagtctgtggcattcattttagcagcagaaaatgataacaagcaataaaaagtttaggataaagtctagttcgagttaacatcatacacacttttattctcatcttttcccatgattcctttttgctaagtataattgaatatatttgattttatggaatgacataacagggaggcaattacttaattttaattctcaactctatttttctacctaaatattcttcaaatattcttgtaactaacagaacctatggaaaataattcttagtattaaagaattttagtagtgccccttgtccacttcaatttcttcctgtctagttttttctaagagcgattgtgatcacaacatgccacaaacagccaagactttagactgctaaaatatgattgaatccctcaggtttcaatcatgtaatcctttaattatatcttacacatctgccttgttgcatccattcttttggttctgacagtgccttcccttgtcctctctgaaggtacctctagttttacgatggctgactgaagcaggacacctctattctggccagacatatcaccctgcttcttttcaatatattggtgcctttccttcctcacaggatccacccagatggaaaccacagcctggacctgaatgttcagtggcaacacaggatccaaacttttgttctctgtgagaactccactcagctctgaagactcaggattaatttccctacatcatgatatcaagagtcttcatttctctgttagaaatatttcttggtttccatcttcatggttgctaagccatgtgctattttattctatagcctgcaaaacataccatggtaggggcacttaaaaataccagtacccactttttctacattcttttcattctagtagtaaccaaccctacttttccaccaagatttctctttacagtatttccaaattcaacaatacatgttgtcactagtccccaacagcagtataaatctctgttctaccaagatctttggactagctcatattttcccctagctgggaatatatggattcattgacaatttaaaaagattccatctatactgatatctggaccctattgctaacagattagtaatttattaatttatgatgaagattataagcatctggttaacacattctttcaattttatgatattcattgattaacgcctcaatctgtaattacatattccctaggttcatagtgaactctaccctcagcttttatttatagcactacctaatcattttattcaattacattatacaatgtgttgctactaagctctatgtcaaaaataatcttaacctggaatagtggcaatggctcagtggattaagtgactattgttcaagcataagaacctgagtacaaattgggagcatggggagagagagggggagttaggagaaagagaaggggagaggaagaatgagagagcaagaagatcaagtcagcaggagaatagaggagagccagataagagacaccatcatagagggagccattataggtttaaagagaaatctggcactagggaaatgcccagaggtctacaaagttgaccacaactaacaatctaagcaacagtggagagactaccttaactgcccttctccaataacgagattgaagactaccttatatgccattctagagccttcatccagtagctgataaaagacacccacagctaaacactgaactgaactctggaatccagttgaagagagggagtagtgatgagcaaaggggtcaagaccagactggagaaacccacagaaactgctgacctgaacaagggggagctcatggaccccaaactgatagctgggaaaccagcataggactgctccagaccccttgaatgaggacatcagtttggaggtctgggtaatctatggggcctctggtagtggatcaatatttatccctagtacaagaatggaccttgggagcccattccacatatatggatattctctcagcctagacacacgggggagggtctaggccctgctccaaatgatatgacagactttaaagatcccccatggaaggcctcaccctccatggagatgagattggggtgcaggggaagagaataggaagagggaactgggattgatatgtaaaacaagcatgtttctaatttattggtttggtggggttttttaggatttttcaagacagggtttctccatattgctttggaggttgtcctggaacctgctctgtagatcaggctggcctcaaactcatagagatctgcctgcctctgcctcccaagtgctgggattaaaggcatgcaccaccaacacctggcttgtttctaatttaatttttttaaaaacttcaaaaaaagaaagaacctgagctcatatccccagtacccacataaaagctaggcatggtataacacttctatgatggctagtgttgggtgtaggctattaaaagggttagctcagccaattgagccaaagttgcaagctctagatctacttagtgacaactttgtgtcaaaaaataaggtagaggccacagaggaagccatggaataatgacctctggcatccacatatgtgcacacacagtctttgatcttaaccttattgtagtggcttgaatgaaaatgaccccaataggtttgtgtatctgaatacttggtccccagttggtaaaactgtttgagaaaggttaggaggcatggccttgctaaaggagatctgtccctgggggtgagctttgagatctcaaaggacccatgctttacctagtctaccattgcctgtctgtcttaaggttatgtctcaatatatgggattccaactactcttccaggaccagccatgcctgcctaactgctgccatgcaccccaacatgctggccatgaactctactaaccctctgtaactaaatcctaaacaaattcttctgttagttaccttgactatggtgtcttgcctcagtaataggaaaataactaagatattttgaagagtccacaaaagtggaaataatgtgcatttgggtctttagaaaagttttataaaggagatgacttttgagattaattttgaagaacatttaggatttgaataaaaagaaaaagataaaagagaatttcaaggcaatgaatagaagtaacaaaatcaggaaagctagccataagtgaagagcaacaattagagatgtttgattggagaatgggatttgattaggagatcataggcaagttagggtgatactggagacagcattggtttccaagtggagggattgagatttactccaggagatgatgggatgtgcaactccaaccaactgtagtattcacccatagtgagcaagtcagataagactctacaacctgatattcaacttagattagaaaaaaaatagtagataatagctattgcctagagatgaggacttgaagaataatgagagcagaattagagaaagtgaattacccatggtagttattgtgtcattgaaaaggctaattaacctgaggtgagctgagaggcaagagggtaaataataagaagctagacaaaaagaatagggataaagattatatagactttagaggtgaaaaagaaaatcaagcaagcagaaagagaaaagaataagtttgatatcttagaagctaagtaggtttgagtagtgactaataatggttgacttttaaaatagtagcagagaaaatagggatgaaggtcattggtgctataaaatacttgccccccccccccgacttaattcccacacctaattctgtgcctgggaatgagtgcacaaatatgagtatgatgtattgatgaggtcatcagcaatgacagacttttggtgtccagggcctcagaagaaagagtgggaaaaaggaagatgcagacatctcagtagttgtgtatgtcaccaaaaacagtcatgatgagaagtgagaaagtttagggtaagaaagcatcatgagtcattaaggaaaggctgaatgacaatagtagaaaactagtaagcttcaaagcaaatagaaaatttgtgcttcactgtcctgacctgcaggacatcaacctggggcaagagagtcagggatagggaatggggacaagagacacagaaagaacgaccacaagacaagattctgatcaagtggcaaactttacttttttctcaggctagcttatatagtcggcagagcaggatatggggaggggtagaatggttgtttgtgagccaggtgttagtgtaggcaggatattaggaagccacaaagaggatgtttggcaggataaagagtatatgagtaagaggtccaggaaggattgcctaggtaactgagcgtgtgggtggaggactaggtcaggttgtttcttttcttgagctgaggtactaaggagctgctatgtcaaggttaactatgtggcctgccaagcatgacctaggatctcatgccaagccatgagatttggctagcaacacttcacaactacctttaacctcttagtaatgcccggatacttcattcctccataattaattaatcaaatacaaaaggacaaatagactttttagagtaaccaaaaatagaacacaggctattttccatagctttagtaggtatgcaattgccctgttcccatatccctttctgcaaagcacagggtcatgagatggagagccagctgcaaaatggaacaaggccttactcttgttgtcaacctgaccccttgttccatctgtaggaccttgtagctctgcagctcccctcttcctagaaataaaatctgggtcacaggggttagaactctaatgaataacttccattgtctaatgaataacttccattgatttcccacctaggagaatcagcattccttttccaacaacagctgtgattattggcagaaagaaggaggaacctgagaaggcttctctccacccctcaacatcatcaaaggcacatataaaacctaaatgcttggagccttaagagtgtagtgggcagccatctttctgtctcctactcaagtaactgctgctgctgctgctgccatagccctggacaaagagcatggacaagatgctgctgctgcttggggtatctatcctcctttcagaagcctttgctcagacaggtaagaaatttaggctacagtcagggagagaaatcgatcttgagctattgtttctctgaatttgttgaaacttactatatgtcttactttatctcacagacctcacaggaaaggtatttgtgttccccagagagtctgaaactgattatgtgaagctgatcccacatctggaaaaaccactggagaacttcacactgtgtttttgaacctatactgacctttcccgccctcacagtcttttctcctacaataccaaggacaaagacaatgagctgctaatttataaggaaagaattggagaatacggattgtacattggaaatttgggagccatagtccgtggggtggaagaatttgcttctccagtgcatttctgcaccagttgggagtcctcttctggcattgctgaattttgggtcaatgggaaaccttgggtaaaaaagggtctgaagaaggggtacactgtgaaagcccaacccagtattatcctaggacaggagcaggataagtatggaggagggtttgataagtcccagtcctttgtaggggagatgggggatttgaacatgtgggactctgtgctgaccccagaagaaattaaatctgtatatgaaggttcctggcttaagcctaacattctggattggcaggctctggattatgaaatgaatggctatgcagtcattaggcctcgtgtgtgggattaagatcttacaacaaaatctcatgaaaatgaaatgaccaatgtccaagaggtcaagtcagcacaactcaacacttaatcctgaatctgcagccttttctcgcttgtgaacttcctgtctacttatctgcctaataaaaatattatcaagttctgcctgcattctttgccacttgatgtaatctcaaatgctttcttttagatttactccttttgaaaattggtgctttgatatctagaaaaattgagttgtaaaatgaagggatggaaaattaacaaagaggaaaatggcaacacttataagctactggtaatcaatttaataataacacaaaatattgtggaattgcagtagaaatccctccacttgtttatccaaatacaagtcaattaaaaagcctgatatagctcaagggacacaactataataagacaggtaaatgacaattgagatcttgacagcaaataatgagatgggaaatccaggataagaatgaaaactaaacatgtataagaaactgagattggtcctgcgacaggtgcccgagcctcagctgagtctgggcactgctctgcccccacaagctccccattcaaccctgctggcttctgcctgaacctcccccccagaggagtggacctggccagactggaaggcaaaccctgagttgggacacacctcacacctctctatactctgccctcagtcctgcagtgggcatcctagcctcaggtgagtctgggggctgctctgcccccccaaactccaccatcaatccctgcttgcttctgcctgagctcacccgagcaagagtagacctgcccagactgggaagtcccaccctgagttcggacacacctcacccttgtccacccaccaccctctgccatctggctgacaccagaggctgagccctccgctggccactggaaaaagggagagaccccacctgcactcactggaagaaggga
